(19) United States
(12) Patent Application Publication
(10) Pub. No.: US 2014/0178958 A1
(43) Pub. Date: Jun. 26, 2014

(54) Cyanobacterium sp. for Production of Compounds

(71) Applicant: ALGENOL BIOFUELS INC., FORT MYERS, FL (US)

(72) Inventors: Irina Piven, Berlin (DE); Alexandra Friedrich, Berlin (DE); Ulf Dühring, Berlin (DE); Frank Uliczka, Berlin (DE); Kerstin Baier, Kleinmachnow (DE); Masami Inaba, Berlin (DE); Tuo Shi, San Diego, CA (US); Kui Wang, Fort Myers, FL (US); Heike Enke, Berlin (DE); Dan Kramer, Berlin (DE)

(73) Assignee: ALGENOL BIOFUELS INC., FORT MYERS, FL (US)

(21) Appl. No.: 14/138,123

(22) Filed: Dec. 22, 2013

Related U.S. Application Data
(60) Provisional application No. 61/741,000, filed on Dec. 21, 2012.
(60) Provisional application No. 61/835,294, filed on Jun. 14, 2013.

(51) Int. Cl. C12P 7/06

(52) U.S. Cl. CPC C12P 7/065
USPC 435/161; 435/257.2

(57) ABSTRACT

A genetically enhanced cyanobacterial host cell, Cyanobacterium sp. ABICyano1, is disclosed. The enhanced Cyanobacterium sp. ABICyano1 produces a compound or compounds of interest.

### CROSS-REFERENCE TO RELATED APPLICATION

[0001] This application claims priority to U.S. provisional application No. 61/741,000 filed on Dec. 21, 2012, and U.S. provisional application No. 61/835,294 filed on Jun. 14, 2013, which are each herein incorporated by reference in their entirety and for all purposes.

### STATEMENT REGARDING FEDERALLY SPONSORED RESEARCH

[0002] This invention was made in part with United States government support under the Department of Energy grant number DE-EE0002867. The government has certain rights associated with this invention.

### REFERENCE TO SEQUENCE LISTING

[0003] This application contains a sequence listing submitted by EFS-Web, thereby satisfying the requirements of 37 C.F.R. §1.821-1.825.

### FIELD OF INVENTION

[0004] The present disclosure relates to the genetic enhancement of cyanobacteria to produce compounds of interest.

### BACKGROUND

[0005] Cyanobacteria are prokaryotes capable of photoautotrophy. Cyanobacteria can be genetically enhanced to use light and CO₂ to produce compounds of interest such as biofuels, industrial chemicals, pharmaceuticals, nutrients, carotenoids, and food supplements. Various cyanobacterial strains have been genetically enhanced to produce compounds of interest. Carbon dioxide that is used by cyanobacteria can be derived from any source, such as a waste byproduct of industrial production. In this way, cyanobacteria can be used to recycle CO₂ to compounds of interest.

[0006] The transformation of the cyanobacterial genus Synechococcus with genes that encode enzymes that can produce ethanol for biofuel production has been described (U.S. Pat. Nos. 6,699,696 and 6,306,639, both to Woods et al.). The transformation of the cyanobacterial genus Synechocystis has been described, for example, in PCT/EP2009/000892 and in PCT/EP20091060526.

[0007] The cyanobacterial genus Cyanobacterium was first established in 1983 (see Rippka et al. (2001), Bergey's Manual of Systematic Bacteriology, Vol. 1, p. 497-498). In general, the genus differs from the genus Synechococcus by differences in DNA base composition and by differences in sensitivity to cyanophages (Moro, et al., 2007 Algological Studies, 123:1-15). Members of the Cyanobacterium genus are often found in thermal mats.

### SUMMARY

[0008] This disclosure provides non-naturally occurring Cyanobacterium sp. ABICyano1 organisms containing ethanologenic pathways with at least one exogenous nucleic acid encoding an ethanologenic pathway enzyme expressed in a sufficient amount to produce ethanol. This disclosure additionally provides methods of using such Cyanobacterium sp. ABICyano1 organisms to produce ethanol by culturing the non-naturally occurring, genetically enhanced Cyanobacterium sp. ABICyano1 organisms containing ethanologenic pathways as described herein under conditions and for a sufficient period of time to produce ethanol.

[0009] In an aspect, a non-naturally occurring ethanologenic Cyanobacterium sp. organism derived from Cyanobacterium sp. ABICyano1 is disclosed, wherein said organism comprises a genetically enhanced plasmid derived from a plasmid that is endogenous to Cyanobacterium sp. ABICyano1, and wherein said organism produces ethanol from about 0.002% (vol/vol.) per day up to about 0.07% (vol/vol) per day. In an embodiment, the non-naturally occurring ethanologenic Cyanobacterium sp. organism is capable of producing ethanol at a rate of 0.07% (vol/vol) per day. In another embodiment, the non-naturally occurring ethanologenic Cyanobacterium sp. organism is capable of producing ethanol at a rate of 0.047% (vol/vol) per twelve hours. In another embodiment, the non-naturally occurring ethanologenic Cyanobacterium sp. organism is capable of producing ethanol at a rate of about 0.0201% (vol/vol) per day at about 114 days of growth. In another embodiment, the non-naturally occurring ethanologenic Cyanobacterium sp. organism produces ethanol at about 135 days of growth. In another embodiment, the non-naturally occurring ethanologenic Cyanobacterium sp. organism comprises Cyanobacterium sp. ABICyano1 deposited in the American Type Culture Collection (ATCC) under ATCC accession number PTA-13311, and further comprises an ethanologenic pathway comprising at least one exogenous nucleic acid encoding an ethanologenic pathway enzyme expressed in a Sufficient amount for the organism to produce ethanol, said ethanologenic pathway comprising a pyruvate decarboxylase, and an dehydrogenase. In yet another embodiment, the non-naturally occurring ethanologenic Cyanobacterium sp. organism of has a genetically enhanced plasmid that is derived from a 6.8 kb plasmid endogenous to Cyanobacterium sp. ABICyano1 consisting of SEQ ID NO: 1. In another embodiment, the non-naturally occurring ethanologenic Cyanobacterium sp. organism contains a genetically enhanced plasmid having at least 50% of a 6.8 kb plasmid endogenous to Cyanobacterium sp. ABICyano1 consisting of SEQ ID NO: 1. In another embodiment, the non-naturally occurring ethanologenic Cyanobacterium sp. organism comprises one, two, or three exogenous nucleic acids each encoding an ethanologenic pathway enzyme. In an embodiment, the non-naturally occurring ethanologenic Cyanobacterium sp. organism comprises a heterologous adh gene and a heterologous pdc gene, and the adh gene is operably linked to a promoter, and the pdc gene is operably linked to a promoter. In an embodiment, the non-naturally occurring ethanologenic Cyanobacterium sp. organism has a heterologous adh gene that encodes for an alcohol dehydrogenase that has an amino acid sequence identity of at least 60% to the amino acid sequence identity of the enzyme encoded for by nucleotides 117 to 1127 of SEQ ID NO: 48. In another embodiment, the non-naturally occurring ethanologenic Cyanobacterium sp. organism has a heterologous pdc gene that encodes for a pyruvate decarboxylase that has an amino acid sequence identity of at least 60% to the amino acid sequence identity of the enzyme encoded for by nucleotides 379 to 2085 of SEQ ID NO: 43. In yet another embodiment, the non-naturally occurring ethanologenic Cyanobacterium sp. organism contains a plasmid selected from plasmids comprising polynucleotide sequences that are 90% or more identical to the polynucleotide sequence of any of SEQ ID NOs 43, 61, 62, 66, 72, 73, 74, 82, 83, 84, 85, and 106. In an embodiment, the non, naturally occurring ethanologenic Cyanobacterium sp. organism has a promoter operably linked to the adh gene that is constitutive, and the promoter that is operably linked to the pdc gene is inducible. In another embodiment, the non-naturally occurring ethanologenic Cyanobacterium sp. organism has a promoter operably linked to the adh gene that is selected from the group consisting of Prbc, Prbc*, PcpcB, PrpsL*4 and PrpsL. In another embodiment, the non-naturally occurring ethanologenic Cyanobacterium sp. organism has a promoter operably linked to the pdc gene that is selected from promoters inducible by the presence or absence of nitrate and/or copper. In another embodiment, the non-naturally occurring ethanologenic Cyanobacterium sp. organism has a promoter or promoters operably linked to a pdc gene that is selected from the group consisting of endogenous PnirA, PnirA, PnirA*1, PnirA*2, PnirA*3, PnirA*4, Porf0221, Porf0223, and Porf0316. In an embodiment, the non-naturally occurring ethanologenic Cyanobacterium sp. organism has a promoter that is operably linked to said adh gene is endogenous to Cyanobacterium sp., and Wherein said promoter operably linked to the pdc gene and is endogenous to Cyanobacterium sp. In another embodiment, the non-naturally occurring ethanologenic Cyanobacterium sp. organism of contains a promoter that is operably linked to the adh gene and a promoter operably linked to the pdc gene and the promoters are selected from promoters comprising polynucleotide sequences that are 90% or more identical to the polynucleotide sequence of any of SEQ ID NOs 9-41. In another embodiment, the non-naturally occurring ethanologenic Cyanobacterium sp. organism contains genetically enhanced plasmids that are selected from plasmids comprising polynucleotide sequences that are 90% or more identical to the polynucleotide sequence of any of SEQ ID NOs: 62, 66, 82, 83, 84, 85, and 106.

[0010] In another aspect, a non-naturally occurring ethanologenic Cyanobacterium sp. organism comprising Cyanobacterium sp. ABICyano1 deposited in the American Type Culture Collection (ATCC) under ATCC accession number PTA-13311, and the organisms further comprises an ethanologenic pathway comprising one, two, or three exogenous nucleic acids each encoding an ethanologenic pathway enzyme expressed in a sufficient amount to produce ethanol, and wherein the ethanologenic pathway has been introduced into the chromosomal DNA of the Cyanobacterium sp. ABICyano1, and wherein the ethanologenic pathway comprises at least one pyruvate decarboxylase gene operably linked to a promoter and an alcohol dehydrogenase gene operably linked to a promoter. In an embodiment, the non-naturally occurring ethanologenic Cyanobacterium sp. organism further comprises a chromosomal knockout of one or more red homologs from Cyanobacterium sp. ABICyano1 selected from the group consisting of SEQ ID NOs: 127 and 128. In another embodiment, the non-naturally occurring ethanologenic Cyanobacterium sp. organism contains an ethanologenic pathway that has been introduced into the chromosomal DNA of the Cyanobacterium sp. ABICyano1 by transforming the non-naturally occurring ethanologenic Cyanobacterium sp. organism with one or more integrative plasmid. In another embodiment, the non-naturally occurring ethanologenic Cyanobacterium sp. organism has an integrative plasmid that is selected from plasmids comprising polynucleotide sequences that are 90% or more identical to the polynucleotide sequence of any of SEQ ID NOs: 107, 108, 109 and 110.

[0011] In another aspect, a Method for producing ethanol is disclosed comprising growing a non-naturally occurring ethanologenic Cyanobacterium sp. organism comprising Cyanobacterium sp. ABICyano1 deposited in the American Type Culture Collection (ATCC) under ATCC accession number PTA-13311, and further comprising an ethanologenic pathway comprising at least one exogenous nucleic acid encoding an ethanologenic pathway enzyme expressed in a sufficient amount for the organism to produce ethanol, and the ethanologenic pathway comprises a pyruvate decarboxylase, and an alcohol dehydrogenase. In an embodiment, the method produces ethanol from about 0.002% vol/vol ethanol per day up to about 0.07% vol/vol ethanol per day. In another embodiment, the organism is capable of producing ethanol at a rate of 0.07% (vol/vol) per day. In yet another embodiment, the organism is capable of producing ethanol at a rate of 0.047% (vol/vol) per twelve hours. In another embodiment, ethanol is produced at a rate of about 0.0201% (vol/vol) per day at about 114 days of growth. In an embodiment, a method for producing ethanol is disclosed wherein the non-naturally occurring ethanologenic Cyanobacterium sp. organism comprises a plasmid selected from plasmids comprising polynucleotide sequences that are 90% or more identical to the polynucleotide sequence of any of SEQ ID NOs 43, 61, 62, 66, 72, 73, 74, 82, 83, 84, 85, and 106.

[0012] In an aspect, a genetically enhanced Cyanobacterium sp. host cell comprising at least one recombinant gene, wherein the recombinant gene encodes one protein selected from a group consisting of a protein that is involved in a biosynthetic pathway for the production of a chemical compound or a marker protein. In an embodiment, the host cell is Cyanobacterium sp. ABICyano1 or a Cyanobacterium sp. host cell derived from the host cell Cyanobacterium sp. ABICyano1 by the introduction of further genetic enhancements. In an embodiment, the host cell can withstand at least one of the following culturing conditions: at least 1%, 2%, 3% or 4% (v/v) ethanol in the medium for at least 6, 12 or 16 weeks, at least 48° C., preferably at least 50° C. or at least 53 to 55° C. for at least 2 hour peaks over at least 7 days, and purging with 60% (v/v) to 80% oxygen. In another embodiment, the host cell has recombinant genes that are located on an extrachromosomal plasmid. In another embodiment, the host cell of the previous claim, wherein the extrachromosomal plasmid contains cyanobacterial nucleic acid sequences. In another embodiment, the extrachromosomal plasmid is derived from a plasmid that is endogenous to the Cyanobacterium sp. host cell. In another embodiment, the recombinant gene is integrated into an endogenous extrachromosomal 6.8 kb plasmid from Cyanobacterium sp. ABICyano1 comprising a polynucleotide sequence of SEQ ID NO: 1. In another embodiment, the extrachromosomal plasmid comprises the recombinant gene, and an origin of replication suitable for replication in the Cyanobacterium sp. ABICyano1 In another embodiment, the host cell further comprises one gene coding for a replication initiation factor binding to the origin of replication. In an embodiment, the host cell of the previous claim, wherein the gene coding for a replication initiation factor is included on the extrachromosomal plasmid. In another embodiment, the sequence of the origin of replication has at least 90%, preferably 95% identity or is identical to the nucleotides 3375 to 3408 of the sequence of the endogenous 6.8 kb plasmid having a polynucleotide sequence comprising SEQ ID NO: 1. In another embodiment, the host cell has a gene for the replication initiation factor that codes for a protein having at least 90%, preferably 95% sequence identity or is identical to the protein coded by nucleotides 594 to 3779 of the sequence of the endogenous 6.8 kb plasmid having a polynucleotide sequence comprising SEQ ID NO: 1. In another embodiment, the extrachromosomal plasmid comprises a sequence with a sequence identity of at least 90%, preferably 95% to the sequence of the endogenous 6.8 kb plasmid having a polynucleotide sequence comprising SEQ ID NO: 1. In yet another embodiment, the extrachromosomal plasmid comprises a recombinant origin of transfer for conjugation. In an embodiment, the extrachromosomal plasmid is a shuttle vector that is able to replicate in two different host species. In an embodiment, the shuttle vector comprises a cyanobacterial origin of replication and an origin of replication for Enterobacteriaceae, in particular E. coli. In another embodiment, the at least one recombinant gene is codon improved for enhancing translation by adapting the codon usage of the at least one recombinant gene to the codon usage of Cyanobacterium sp., in particular Cyanobacterium ABICyano1. In an embodiment, the G and/or C wobble bases in the codons have been replaced by A and/or T. In an embodiment, the recombinant gene is integrated into a chromosome of the host cell. In another embodiment, the recombinant gene is integrated into an endogenous gene of the host cell thereby leading to a gene inactivation of the endogenous gene. In an embodiment, the protein is involved in a biosynthetic pathway for the production of a chemical compound. In another embodiment, the chemical compound is a biofuel or another organic compound. In yet another embodiment, the biofuel or the other organic compound is selected from a group consisting of alcohols, alkanes, polyhydroxyalkanoates, fatty acids, fatty acid esters, carboxylic acids, amino acids, hydrogen, terpenes, terpenoids, peptides, polyketides, alkaloids, lactams, pyrrolidone, alkenes, ethers, tetrahydrofuran and combinations thereof. In another embodiment, the chemical compound is an alcohol. In another embodiment, the chemical compound is ethanol. In another embodiment, the genes for ethanol production are selected from a group of genes consisting of pdc coding for PDC enzyme catalyzing the interconversion between pyruvate and acetaldehyde, adh coding for ADH enzyme catalyzing the interconversion between acetaldehyde and ethanol, and adhE, coding for AdhE enzyme catalyzing the interconversion between acetyl-CoA and ethanol. In yet another embodiment, the at least one recombinant gene is under the control of either a constitutive or inducible promoter. In an embodiment, the promoter is a cyanobacterial promoter. In an embodiment, the promoter is endogenous to the genetically enhanced Cyanobacterium sp. In another embodiment, the promoter has at least 90% sequence identity to an endogenous promoter of the genetically enhanced Cyanobacterium sp. In an embodiment, the promoter is an inducible promoter selected from a group consisting of PnirA, PziaA, PsmtA, PcorT, PnrsB, PnrtA, PpetJ, PnarB and other metal-ion inducible promoters and variations thereof. In another embodiment, the promoter is an inducible promoter and has at least 90%, preferably 95% sequence identity or is identical to the promoters having SEQ ID NOs 9-41. In an embodiment, the promoter is an inducible promoter having the following general nucleotide sequences of SEQ ID NOs: 112 to 124. In another embodiment, the promoter is a constitutive promoter selected from a group consisting of PrpsL, PcpcB, Prbc, PpetE and variations thereof. In an embodiment, the promoter includes nucleotide changes in either one of the ribosomal binding site, the TATA box, the operator or the 5′-UTR (untranslated region). In another embodiment, the promoter is selected from PnirA, PcorT and PsmtA. In another embodiment, the host cell comprises at least a first and a second recombinant gene. In an embodiment, the first and second recombinant genes are under the transcriptional control of different first and second promoters and the first recombinant gene encodes pyruvate decarboxylase and the second recombinant gene encodes alcohol dehydrogenase. In another embodiment, a transcription terminator is present between the first and second recombinant gene. In an embodiment, the first recombinant gene encodes pyruvate decarboxylase and the second recombinant gene encodes alcohol dehydrogenase and wherein the first recombinant gene is under the transcriptional control of a first inducible promoter and wherein the second recombinant gene is under the transcriptional control of a second constitutive promoter. In an embodiment, the second constitutive promoter is selected from a group consisting of the following from PrpsL*4: GAGCTCTAGAAAACTATTGACAAACCCATAAAAAATGTGATATTTATAGATTGT CACTGGTATTTTATACTAGAGGCAAATTATATTTATATATACAAAAATGCTGTAGGA GGATCAGCCATATG, Prbc*(optRBS) with the sequence: ACTAG TTGACATAAG TAAAGGCATC CCCTGCGTGA TATAATTACCTTCAGTTTAA GGAGGLTACACAT, and PcpcB with sequence: TGAGAAAAAGTGTAAACAAATATTAAGAAAGATCAGAAAAATTTAACAACACGT AATAAAAAAATGCGTCACTACGGGTTATAAATTTACATGAAAGGTTAAAACACTITT CTGAGACGATTTTGATAAAAAAGTTGTCAAAAAATTAAGTTTCTTTACAAATGCTTA ACAAAAACTTGGTTTIAAGCACAAAATAAGAGAGACTAATTTGCAGAAGTTTTACAA GGAAATCTTGAGANAGATCTAAGTAAAACGACTCTGTTTAACCAAAATTTAACA AATTTAACAAAACAAACTAAATCTATTAGGAGATTAACTAAGC. In another embodiment, the host cell is able to produce ethanol in quantities of at least 0.025%(v) per day, preferably at least 0.03 (v/v) per day, most preferred at least 0.0493% (v/v) per day. In another embodiment, the host cell of any of the previous claims for ethanol production, wherein the first recombinant gene encodes AdhE enzyme directly converting acetyl-CoA to ethanol.

[0013] In an aspect, a transformable Cyanobacterium sp. cell is disclosed that comprises an extracellular polymer layer (EPS) pretreated with compounds selected from a group consisting of N-acetylcysteine, lysozyme, β-galactosidase and combinations thereof.

[0014] In another aspect, a method for producing a chemical compound is disclosed comprising the method steps of: a) culturing the genetically enhanced cyanobacterial host cells according to any of the preceding claims in a culture medium, the host cells thereby producing the chemical compound, and b) retrieving the chemical compound from either one of: the host cells, the medium or the headspace above the medium, and wherein during method step A) the host cells are subjected to light and CO2.

[0015] In another aspect, disclosed is a method for producing a genetically enhanced Cyanobacterium sp. host cell comprising introducing the recombinant gene into the genome of the host cell comprising the method steps of:

[0016] A) subjecting the host cell to compounds increasing the permeability of the extracellular polymeric layer (EPS) and cell wall, respectively of the host cell, and

[0017] B) introducing the recombinant nucleic acid sequence into the host cell. In an embodiment, the recombinant nucleic acid sequence comprises an extrachromosomal plasmid. In another embodiment, the extrachromosomal plasmid is derived from an endogenous plasmid of the host cell by at least the introduction of the recombinant gene. In another embodiment, the method comprises protecting the recombinant nucleic acid sequence against endogenous restriction endonucleases of the host cell by for example methylating at least a part of the recombinant nucleic, acid sequence or modifying and/or eliminating the recognition sequences of the endogenous restriction endonucleases and wherein the recombinant nucleic acid sequence is subjected to methyltransferases, for example M.AvaI and M.AcyI. In another embodiment, the in the method step A) the compounds are selected from a group consisting of: N-acetylcysteine, lysozyme, and β-galactosidase and combinations thereof and a combination comprising N-acetylcysteine and lysozyme is used. In an embodiment, the host cell is first subjected to N-acetylcysteine followed by a treatment of lysozyme, and wherein the host cell is subjected to N-acetylcysteine for 0.5 to 3 days, preferably to 1 to 2 days and is further treated with lysozyme for 3 min. to 1 hour, preferably for 10 min to 30 min, most preferred for 10 to 15 min. In another embodiment, the N-acetylcysteine treatment is carried out at a temperature of 12° C. to 37° C. and the lysozyme treatment is conducted in a temperature range from 20° C. to 37° C., preferably at a temperature range from 20° C. to 30° C. In an embodiment, the concentration of N-acetylcysteine is kept between 0.05 mg/mL and 1 mg/mL and the concentration of lysozyme is between 10 to 60 μg/mL. In another embodiment, in method step B) the recombinant nucleic acid sequence is introduced into the host cell via conjugation or electroporation. In another embodiment, in method step A) the cells are subjected to positively charged polyaminoacids such as poly-L-lysine hydrobromide or poly-L-omithine hydrochloride or combinations thereof.

[0018] In another aspect, a method for transforming cyanobacterial cells having an extracellular polymeric layer (EPS) comprising treating the cells with compounds selected from a group consisting of: N-acetylcysteine, lysozyme, and β-galactosidase and combinations thereof, before and/or during transformation with a recombinant DNA wherein the cyanobacterial cell in addition includes restriction endonucleases and wherein the method further comprises methylating the restriction sites of the recombinant DNA before or during transformation. In an embodiment, the plasmid vector has a first recombinant gene codes for a first enzyme catalyzing a metabolic reaction, which is not present in the wild type host cell and the first recombinant genes is pyruvate decarboxylase gene coding for PDC enzyme as a first enzyme and the second recombinant gene is adh coding for ADH enzyme. In an embodiment, the plasmid vector of any has a transcription terminator is present between the first and second recombinant gene.

[0019] In another aspect, a method for introducing a recombinant nucleic acid sequence into a cyanobacterial cell with an extracellular polymeric layer (EPS) comprising the method steps of:

[0020] A) subjecting the cyanobacterial cell to compounds increasing the permeability of the extracellular polymeric layer (EPS) and cell wall, respectively of the cyanobacterial cell, and

[0021] B) introducing the recombinant nucleic acid sequence into the cyanobacterial cell. In an embodiment, the cyanobacterial cell is subjected to compounds selected from a group consisting of: N-acetylcysteine, lysozyme, and β-galactosidase and combinations thereof.

[0022] In an aspect, a kit for producing a chemical compound via photosynthesis, comprising host including the recombinant gene encoding one protein that is involved in a biosynthetic pathway for the production of the chemical compound, a vessel for culturing the host cells, and means for illumination of the host cells and wherein the host cells are in a transportable form, wherein the host cells are at least in one of the following transportable forms, suspended in a liquid growth medium, in a frozen form, on an agar plate. In another embodiment, the vessel comprises a photobioreactor which is at least partly transparent for the radiation emitted by the means for illumination of the host cells wherein the means for illumination of the host cells comprises lamps or light emitting diodes or a combination thereof.

[0023] In an aspect, a genetically enhanced ethanologenic copper inducible ABICyano1 host cell is disclosed wherein the host cell exhibits ethanol production up to 135 days.

[0024] In another aspect, a genetically enhanced ethanologenic ABICyano1 host cell is disclosed comprising adh genes that encode for alcohol dehydrogenase enzymes with catalytic properties that result in increased ethanol production relative to the ethanol production of alcohol dehydrogenase from Synechocystis sp. PCC 6803. In an embodiment, the genetically enhanced plasmids are derived from endogenous plasmids of the host cell wherein the genetically enhanced plasmids are selected from the group consisting of #1792, #1743, #1744, #1749, #1751, #1817, #1818, #1728, and #1578 and can also comprise multiple copies of pdc genes. In an embodiment, the multiple copies are integrated into the chromosome or into a plasmid within the host cell and can comprise plasmids selected from the group consisting of #1792, #1743, #1744, #1749, 41751, #1817, #1818, #1728, and #1578. In an embodiment, a method for generating knockouts in the genome of ABICyano1 comprising introducing a heterologous polynucleotide construct into a ABICyano1 host cell wherein the heterologous polynucleotide construct comprises flanking regions of about 2 kbp or greater that are homologous to a gene or gene portion in the genome of ABICyano1. In another embodiment, the homologous recombination efficiency is increased through the deletion of a gene homologue in ABICyano1 that encodes for a RecJ homolog selected from the group consisting of orf0488, and orf2384. In yet another embodiment, the knockouts are selected from the group consisting of narB, argH, leuB, a homologue of a Rad54 encoding gene, and ycf37.

[0025] In an aspect, the ethanologenic cassette is selected from an ethanologenic cassette selected from a plasmid selected from the group consisting of #1495, #1578, #1580, #1581, #1601, #1606, TK412 and TK411.

[0026] In an aspect, a genetically enhanced ethanologenic ABICyano1 host cell is disclosed comprising an ethanologenic cassette comprising adh and pdc genes that are under the control of endogenous metal inducible promoters selected from the group consisting of Porf0128 (SEQ ID NO: 19), Porf1486 (SEQ ID NO: 20), Porf3164 (SEQ ID NO: 21), Porf3293 (SEQ ID NO: 22), Porf3621 (SEQ ID NO: 23), Porf3635 (SEQ ID NO: 24), Porf3858 (SEQ ID NO: 25), Porf1071 (SEQ ID NO: 26), Porf1072 (SEQ ID NO: 27), Porf1074 (SEQ ID NO: 28), Porf1075 (SEQ ID NO: 29), Porf1542 (SEQ ID NO: 30), Porf1823 (SEQ ID NO: 31), Porf1824 (SEQ ID NO: 32), Porf3126 (SEQ ID NO: 33), Porf3389 (SEQ ID NO: 34), Porf0221 (SEQ ID NO: 35), Porf0222 (SEQ ID NO: 36), Porf0223 (SEQ ID NO: 37), Porf0316 (SEQ ID NO: 38), Porf3232 (SEQ ID NO: 39), Porf3461 (SEQ ID NO: 40), and Porf3749 (SEQ ID NO: 41), Porf1071 and Porf3126.

[0027] In another aspect, disclosed is a genetically enhanced ethanologenic ABICyano1 host cell comprising a genomic knockout of the flv3 gene wherein the host cell produces more ethanol that the corresponding host cell having an intact flv3 gene. In an embodiment, the production of ethanol is about 10% to about 20% greater than the host cell having an intact flv3 gene. In an embodiment, the plasmid comprises plasmid #1772.

[0028] In another aspect, a method for making ethanol is disclosed comprising growing the host cell comprising a genomic knockout of a ycf37 gene and further comprising knocking out a genomic ycf37 gene in an ethanologenic ABICyano1 host cell.

[0029] In an aspect, a non-naturally occurring ethanologenic Cyanobacterium sp. ABICyano1 organism is disclosed wherein the promoter operably linked to an adh gene and the promoter operably linked to a pdc gene are selected from the group consisting of PrbcLS, PntcA, PnblA, PisiA, PpetJ, PpetE, PcorT, PsmtA, PziaA, PsigB, PlrtA, PhtpG, PhspA, PclpB1, PhliB, PggpS, PpsbA2, PpsaA, PnirA, PnarB, PnrtA, PisiB, PnrsB, PlrtA, PmrgA, PpstS, and PerhC, PpetJ, PpsbD, PnblA, PrpoA, PisiB, PnblA, PisiA, PpetJ, PpetE, PcorT, PsmtA, PziaA, PsigB, PlrtA, PhtpG, PhspA, PclpB1, PhliB, PggpS, PpsbA2, PpsaA, PnirA, PnarB, PurtA, PcrhC, PrbcL, PrnpA, PrpsL, PrpoA, PpsaA, PpsbA2, PpsbD, PcpcB, PhspA, PclpB1, PhliB, PnirA*2, PnirA*3 PnirA*4, PmntC, PrpsL*4, Prbc*, PcpcB, PrpsL*4, PcpcB (SEQ ID NO: 9), PnirA (SEQ ID NO: 10), PlrtA (SEQ ID NO: 11), PmrgA (SEQ ID NO: 12), PnblA (SEQ ID NO: 13), PggpS (SEQ ID NO: 14), PpetJ (SEQ ID NO: 15), PppsA (SEQ ID NO: 16), PrnpA (SEQ ID NO: 17), PpstS (SEQ ID NO: 18), Porf0128 (SEQ ID NO: 19), Porf1486 (SEQ ID NO: 20), Porf3164 (SEQ ID NO: 21), Porf3293 (SEQ ID NO: 22), Porf3621 (SEQ ID NO: 23), Porf3635 (SEQ ID NO: 24), Porf3858 (SEQ ID NO: 25), Porf1071 (SEQ ID NO: 26), Porf1072 (SEQ ID NO: 27), Porf1074 (SEQ ID NO: 28), Porf1075 (SEQ ID NO: 29), Porf1542 (SEQ ID NO: 30), Porf823 (SEQ ID NO: 31), Porf1824 (SEQ ID NO: 32), Porf3126 (SEQ ID NO: 33), Porf3389 (SEQ ID NO: 34). Porf0221 (SEQ ID NO: 35), Porf0222 (SEQ ID NO: 36), Porf0223 (SEQ ID NO: 37), Porf0316 (SEQ ID NO: 38), Porf3232 (SEQ ID NO: 39), Porf3461 (SEQ ID NO: 40), Porf3749, and (SEQ ID NO: 41). In an embodiment, the promoter operably linked to an adh gene and the promoter operably linked to a pdc gene are selected from the group consisting of Porf0128, Porf1486, Porf3164, Porf3293, Porf3621, Porf3635, Porf1071, Porf072, Porf1074, Porf1075, Porf1542, Porf1823, Porf3126, Porf0221, Porf0222, Porf0223, Porf0316, Porf3126, Porf3232, Porf3461, and Porf3749. In another embodiment, the non-naturally occurring ethanologenic Cyanobacterium sp. ABICyano1 organism contains a promoter operably linked to an adh gene and the promoter operably linked to a pdc gene are selected from a polynucleotide sequence having at least 90% identity to a polynucleotide sequence selected from the group consisting of PrbcLS, PntcA, PnblA, PisiA, PpetJ, PpetE, PcorT, PsmtA, PziaA, PsigB, PlrtA, PhtpG, PhspA, PclpB1, PhliB, PggpS, PpsbA2, PpsaA, PnirA, PnarB, PnrtA, PisiB, PnrsB, PlrtA, PmrgA, PpstS, and PcrhC, PpetJ, PpsbD, PnblA, PrpoA, PisiB, PnblA, PisiA, PpetJ, PpetE, PcorT, PsmtA, PziaA, PsigB, PlrtA, PhtpG, PhspA, PclpB1, PhliB, PggpS, PpsbA2, PpsaA, PnirA, PnarB, PnrtA, PcrhC, PrbcL, PrnpA, PrpsL, PrpoA, PpsaA, PpsbA2, PpsbD, PcpcB, PhspA, PclpB1, PhliB, PnirA*2, PnirA*3, PnirA*4, PmntC, PrpsL*4, Prbc*, PcpcB, PrpsL*4, PcpcB (SEQ ID NO: 9), PnirA (SEQ ID NO: 10), PlrtA (SEQ ID NO: 11), PmrgA (SEQ ID NO: 12), PnblA (SEQ ID NO: 13), PggpS (SEQ ID NO: 14), PpetJ (SEQ ID NO: 15), PppsA (SEQ ID NO: 16), PrnpA (SEQ ID NO: 17), PpstS (SEQ ID NO: 18), Porf0128 (SEQ ID NO: 19), Porf1486 (SEQ ID NO: 20), Porf3164 (SEQ ID NO: 21), Porf3293 (SEQ ID NO: 22), Porf3621 (SEQ ID NO: 23), Porf3635 (SEQ ID NO: 24), Porf3858 (SEQ ID NO: 25), Porf1071 (SEQ ID NO: 26), Porf1072 (SEQ ID NO: 27), Porf1074 (SEQ ID NO: 28), Porf1075 (SEQ ID NO: 29), Porf1542 (SEQ ID NO: 30), Porf1823 (SEQ ID NO: 31), Porf1824 (SEQ ID NO: 32), Porf3126 (SEQ ID NO: 33), Porf3389 (SEQ ID NO: 34), Porf0221 (SEQ ID NO: 35), Porf0222 (SEQ ID NO: 36), Porf0223 (SEQ ID NO: 37), Porf0316 (SEQ ID NO: 38), Porf3232 (SEQ ID NO: 39), Porf3461 (SEQ ID NO: 40), Porf3749, and (SEQ ID NO: 41). In another embodiment, the non-naturally occurring ethanologenic Cyanobacterium sp. ABICyano1 organism contains a genetically enhanced plasmid that is selected from the group consisting of TK293, TK441, TK480, TK481, TK482, TK483, TK484, TK485, TK486, TK487, TK488, TK489, TK490, TK491, TK492, TK493, TK500, TK501, TK502, TK503, TK504, TK527, TK528, TK529, #1581, #1578, TK368, #1495, #1606, #1.629, #1636, #1631, #1632, #1580, #1601, #1606, TK411, and TK412.

### BRIEF DESCRIPTION OF THE DRAWINGS

[0030] FIG. 1 depicts two panels of microscopic images that demonstrate the presence of the extracellular polymer (EPS) layer that is present in a sheath surrounding the Cyanobacterium sp. ABICyano1 cell. The left panel is without stain and the right panel is with a stain specific for EPS.

[0031] FIGS. 2A and 2B depict the thermotoloerance growth characteristics of Cyanobacterium sp. ABICyano1 (panel A) and Synechococcus PCC 7002 (panel B).

[0032] FIG. 3 depicts a plasmid map with sequence annotation of the 6828 bp endogenous plasmid of Cyanobacterium ABICyano1 cell.

[0033] FIG. 4 depicts a phylogenetic tree showing the relationship between Cyanobacterium sp. ABICyano1 and other cyanobacterial genera and species.

[0034] FIG. 5 depicts a sequence comparison of 16S rDNA of ABICyano1 with 16S rDNA from other Cyanobacterium species.

[0035] FIG. 6 depicts an image of an agarose gel having undergone electrophoresis to show how methylation of a plasmid only containing antibiotic resistance genes may at least partially protect it from digestion by a crude extract of ABICyano1.

[0036] FIG. 7 depicts a map of the plasmid construct and sequence annotation of plasmid TK225 (pABICyano1-6.8 PnirABICyano1-PDC(opt1)-synADH(opt1)-PrbcABICyano1-Km**-oriVT).

[0037] FIG. 8 depicts a map of the plasmid construct and sequence annotation of plasmid TK293 (pABICyano1-6.8 PnirAABICyano1-PDC(opt1)-PrpsLABICyano1-synADH(opt1)-PrbcABICyano1-Km**-oriVT).

[0038] FIG. 9 is a map of the plasmid construct and sequence annotation of plasmid TK295 (pABICyano1-6.8 PnirAABICyano1-PDC(opt1)-PpsbAABICyano1-synADH(opt1)-PrbcABICyano1-Km**-oriVT).

[0039] FIG. 10 is a map of the plasmid construct and sequence annotation of plasmid TK229 (pABICyano1-6.8 PpetEABICyano1-PDC(opt1)-synADH(opt1)-PrbcABICyano1-Km**-oriVT).

[0040] FIG. 11 depicts a map of the plasmid construct TK368 (pABICyano1-6.8 PpetEABICyano1-PDC(opt1)-PrpsLABICyano1-synADH(opt1)-PrbcABICyano1-Km**-oriVT).

[0041] FIG. 12 depicts a map of the plasmid construct and sequence annotation of plasmid #1495 (pABICyano1-6.8::PnirAABICyano1-zmPDCABICyano1(opt3)-PrpsLABICyano1-ADHABICyano1(opt3)ter-PrbcABICyano1-Km**).

[0042] FIG. 13 depicts a map of the plasmid construct and sequence annotation of plasmid #1578 (pABIcyano1-PnirA-zmPDC(opt3)-dsrA-Prbc(optRBS)-synADHoop).

[0043] FIG. 14 depicts a map of the plasmid construct and sequence annotation of plasmid #1581 (pABICyano1-6.8::PnirAABICyano1-zmPDCABICyano1 (opt3)-dsrA-PrpsLABICyano1-ADHABICyano1(opt 3)ter-PrbcABICyano1-Km**).

[0044] FIG. 15 depicts a map of plasmid construct and sequence annotation of plasmid TK441 (pABICyano:PpetJABICyano1-PDC(opt1)-PrpsLABICyano-synADH(opt1)-PrbcABICyano-Km**).

[0045] FIG. 16 depicts a map of plasmid construct and sequence annotation of plasmid #1629 (pABICyano1-6.8::PnirA(opt2)-zmPDC(opt1)_dsrA-Prbc*(optRBS)-synADH(opt1)_ter).

[0046] FIG. 17 depicts a map of plasmid construct and sequence annotation of plasmid #1636 (pABICyano1-6.8::PnirA(opt3)-zmPDC(opt1)dsrA-Prbc*(optRBS)-synADH(opt1)_ter).

[0047] FIG. 18 depicts a map of plasmid construct and sequence annotation of plasmid #1630 (pABICyano1-6.8::corR-PcorT*1-zmPDC(opt1)_dsrA-Prbc*(optRBS)-synADH(opt1)_ter).

[0048] FIG. 19 depicts a map of plasmid construct and sequence annotation of plasmid #1631 (pABICyano1-6.8::corR-PcorT*2-zmPDC(opt1)_dsrA-Prbc*(optRBS)-synADH(opt1)_ter).

[0049] FIG. 20 depicts a map of plasmid construct and sequence annotation of plasmid #1632 (pABICyano1-6.8::corR-PcorT*3-zmPDCABICyano1(opt1)_dsrA-Prbc*(optRBS)-synADH(opt1)_ter).

[0050] FIG. 21 depicts a map of plasmid construct and sequence annotation of plasmid #1635 (pABICyano1-6.8::smtB-PsmtA-zmPDC(opt1)_dsrA-Prbc*(optRBS)-synADH(opt1)_ter).

[0051] FIG. 22 depicts a map of plasmid construct and sequence annotation of plasmid #1639 (pABICyano1-6.8::smtB-PsmtA*1-zmPDC(opt1)_dsrA-Prbc*(optRBS)-synADH(opt1)_ter).

[0052] FIG. 23 depicts a map of plasmid construct and sequence annotation of plasmid #1640 (pABICyano1-6.8::smtB-PsmtA*2-zmPDC(opt1)_dsrA-Prbc*(optRBS)-synADH(opt1)_ter).

[0053] FIG. 24 depicts a sequence comparison between the native promoter nirA from ABICyano1 and different variants of the promoter harboring nucleotide changes in the ribosomal binding site, the binding sites for the regulators NtcA and NtcB and the TATA box.

[0054] FIG. 25 depicts a map of the plasmid construct and sequence annotation of plasmid #1606 (pABICyano1::PnirA-zmPDC(opt1)_dsrA-Prbc*(optRBS)-synADH(opt1)_ter).

[0055] FIG. 26 depicts a nucleotide sequence comparison between different corT promoters.

[0056] FIG. 27 depicts a nucleotide sequence comparison between the native smtA promoter from Synechococcus PCC 7002 and two different variants of the promoter containing mutations in the ribosomal binding site.

[0057] FIG. 28 depicts ethanol production normalized to the growth (OD₇₅₀ₙₘ) for ABICyano1 strains transformed with plasmids #1606, #1629 and #1636.

[0058] FIG. 29 depicts the specific activity of PDC for ABICyano1 strains transformed with plasmids #1606, #1629 and #1636.

[0059] FIG. 30 depicts the specific activity of ADH for ABICyano1 strains transformed with plasmids #1606, #1629 and #1636.

[0060] FIG. 31 depicts ethanol production normalized to the growth (OD₇₅₀ₙₘ) for ABICyano1 strains transformed with plasmids #1606, #1631 and #1632.

[0061] FIG. 32 depicts the specific activity of PDC for ABICyano1 strains transformed with plasmids #1606, #1631 and #1632.

[0062] FIG. 33 depicts the specific activity of ADH for ABICyano1 strains transformed with plasmids #1606, #1631 and #1632.

[0063] FIG. 34 depicts the production of ethanol and acetaldehyde from Cyanobacterium sp. ABICyano1 strains containing either one of ethanologenic plasmids TK293 and TK225.

[0064] FIGS. 35A to 35D depict the ethanol production rate, acetaldehyde accumulation and ADH and PDC activities of about a 15 day cultivation of Cyanobacterium sp. ABICyano1 containing the ethanologenic plasmid TK225.

[0065] FIGS. 36A to 36C depict ethanol production rate, cell growth and maximum ethanol production rate for 7 days from a 14 day cultivation of Cyanobacterium sp. ABICyano1 containing the ethanologenic plasmid TK293.

[0066] FIG. 37 depicts the ethanol production rates and the acetaldehyde accumulation for Cyanobacterium sp. ABICyano1 strains TK293, #1495, #1578 and #1581.

[0067] FIG. 38 depicts and compares (in the left panel) the PDC enzyme activity and (in the right panel) the ADH enzyme activity between ABICyano1 host cells each containing one of the plasmids TK293, #1495, #1578, and #1581,

[0068] FIGS. 39A and 39B depict ethanol production in an ABICyano1 TK441 strain having the endogenous P_{petJ} upstream of an ethanologenic gene cassette producing the same amount of ethanol (percent v/v) under copper depletion (FIG. 39A) conditions as compared to an ABICyano1 TK293 strain grown in marine BG11 in FIG. 39B.

[0069] FIG. 40 depicts the ethanol production rate of the ABICyano1 transformed with plasmid #1635.

[0070] FIG. 41 depicts the ethanol production rate of the ABICyano1 transformed with plasmid #1639.

[0071] FIG. 42 depicts the ethanol production rate of the ABICyano1 transformed with plasmid #1640.

[0072] FIG. 43 depicts different variations of the components of the ethanologenic gene cassettes.

[0073] FIG. 44 depicts cell growth, ethanol production and OD₇₅₀ normalized ethanol production of ABICyano1 with TK293 or #1578.

[0074] FIG. 45 depicts PDC and ADH activity in ABICyano1 with TK293 or #1578.

[0075] FIG. 46 depicts overlays of the curve progression in regard to cell growth, overlays of the curve progression in regard to ethanol production, overlays of the curve progression in regard to the ethanol production rate and a comparison of the PDC and ADH activity between ABICyano1 #1578 and ABICyano1 TK293.

[0076] FIG. 47 depicts improved ethanol production and reduced acetaldehyde accumulation for ABICyano1 #1578 in relation to ABICyano1 TK293. The alterations in activity of PDC and synADH observed for ABICyano1 #1578 enhanced ethanol productivity in ABICyano1 by about 20-25%.

[0077] FIG. 48 depicts the higher ethanol production rate and lower growth for ABICyano1 #1578 as compared to TK293 and shows that PDC regulates the partitioning of carbon fixed by photosynthesis into biomass and ethanol.

[0078] FIG. 49 depicts ethanol production in several ABICyano1 strains including copper-inducible promoters controlling the pdc expression.

[0079] FIG. 50 depicts the ethanol production of ABICyano1 TK2.93 (pABICyano1-6.8::PnirA-PDC(opt1)-PrpsL-synADH(opt1)_ter) compared to ABICyano1 TK483 (pABICyano1-6.8::Porf0221-zmPDC_(opt1)dsrA-Prbc*(optRBS)-ADH111(opt)_ter) in the presence and absence of 3 μM Cu²⁺.

[0080] FIG. 51 depicts sequence information and annotation of endogenous copper inducible promoters Porf0316, Porf3416, and zinc inducible promoters Porf3126, Porf1071 (also repressible by manganese).

[0081] FIG. 52 depicts a plasmid map with sequence annotation of TK480 (pABIcyano1-PmntC-zmPDC(opt1)dsrA-Prbc*(optRBS)-ADH111(opt)_ter).

[0082] FIG. 53 depicts a plasmid map with sequence annotation for TK483 (pABIcyano1-Porf0221-zmPDC(opt1)dsrA-Prbc*(optRBS)-ADH111(opt)_ter).

[0083] FIG. 54 depicts a plasmid map with sequence annotation for TK487 (pABIcyano1-Porf0316-zmPDC(opt1)dsrA-Prbc*(optRBS)-ADH111(opt)_ter).

[0084] FIG. 55 depicts a plasmid map with sequence annotation for TK488 (pABIcyano1-PsigH-zmPDC(opt1)dsrA-Prbc*(optRBS)-ADH111(opt)_ter).

[0085] FIG. 56 depicts a plasmid map with sequence annotation for TK489 (pABIcyano1-Porf1542-zmPDC(opt1)dsrA-Prbc*(optRBS)-ADH111(opt)_ter).

[0086] FIG. 57 depicts a plasmid map with sequence annotation for TK490 pABIcyano1-Porf126-zmPDC(opt1)dsrA-Prbc*(optRBS)-ADH111(opt)_ter).

[0087] FIG. 58 depicts a plasmid map for TK504)ABIcyano1-Porf0223-zmPDC(opt1)dsrA-Prbc*(optRBS)-ADH111(opt)_ter).

[0088] FIG. 59 depicts the ethanol production of TK480 and #1770.

[0089] FIG. 60 depicts the ethanol production of TK488.

[0090] FIG. 61 depicts the ethanol production of TK489.

[0091] FIG. 62 depicts the ethanol production of TK490 and #1773.

[0092] FIG. 63 depicts the ethanol production of TK487 and #1772.

[0093] FIG. 64 depicts the ethanol production of TK483 and #1771.

[0094] FIG. 65 depicts the ethanol production of TK504 and #1774.

[0095] FIG. 66 depicts PDC activity for TK483, TK487, TK504, #1771, #1772, and #1774 induced with different amounts of copper.

[0096] FIG. 67 depicts copper-inducible strains such as #1771 (P_{orf0221}), #1772 (P_{orf0316}) and #1774 (P_{orf0223}) as well as a zinc-inducible strain #1770 (P_{mntC}) exhibit a higher ethanol productivity than a nitrate inducible strain TK293 uses the nirA promoter.

[0097] FIG. 68 depicts that the PDC activity of strains #1770, #1771, #1772 and #1774 were greater than TK293.

[0098] FIG. 69 depicts initial induction with 1.6 μM Cu²⁺ (which is about five times the Cu²⁺ concentration of BG11) followed by further copper additions different in all four treatments of TK487 for ethanol production.

[0099] FIG. 70 depicts initial induction with 1.6 μM Cu²⁺ (which is about five times the Cu²⁺ concentration of BG11) followed by further copper additions different in all four treatments of TK487 for cell growth.

[0100] FIG. 71 depicts PDC activity in TK487 for the cultivation depicted in FIGS. 70 and 71.

[0101] FIG. 72 depicts ethanol per cell density of induced TK487 for the cultivation depicted in FIGS. 70 and 71.

[0102] FIG. 73 depicts the effect on cell growth of releasing copper into solution over a prolonged period of time and at various concentrations of copper to a TK487 strain.

[0103] FIG. 74 depicts the effect on PDC activity of releasing copper into solution over a prolonged period of time and at various concentrations of copper to a TK487 strain.

[0104] FIG. 75 depicts the effect on ethanol production of releasing copper into solution over a prolonged period of time and at various concentrations of copper to a TK487 strain.

[0105] FIG. 76 depicts the effect on ethanol production per OD₇₅₀ of releasing copper into solution over a prolonged period of time and at various concentrations of copper to a TK487 strain.

[0106] FIG. 77 depicts the ethanol production over time of an ABICyano1 strain #1771 incubated with different bivalent metal-ions to test the specificity for copper.

[0107] FIG. 78 depicts the ethanol production over time of an ABICyano1 strain #1772 incubated with different bivalent metal-ions to test the specificity for copper.

[0108] FIG. 79 depicts the ethanol production over time of an ABICyano1 strain #1774 incubated with different bivalent metal-ions to test the specificity for copper.

[0109] FIG. 80 depicts both ethanologenic ABICyano1 strains TK441 and #1769 producing ethanol in growth media substantially lacking copper ion while producing less ethanol in the presence of 3 μM copper ion.

[0110] FIG. 81 depicts the activity of PDC in the uninduced state and after 72 hours of induction for ABICyano1 strains transformed with the plasmids #1578, #1701, #1658, #1697 and #1663.

[0111] FIG. 82 depicts the activity of PDC during the course of a 30 day cultivation for ABICyano1 strains transformed with the plasmids #1578, #1658, #1697 and #1663.

[0112] FIG. 83 depicts OD₇₅₀ₙₘ-normalized ethanol production (% EtOH per OD₇₅₀ₙₘ) during the course of a 29 day cultivation for ABICyano1 strains transformed with the plasmids #1578, #1658, #1697 and #1663.

[0113] FIG. 84 depicts the OD₇₅₀ₙₘ of a 30 day cultivation grown at 125 μE*m⁻²*s⁻¹ in a 12 h/12 day/night cycle.

[0114] FIG. 85 depicts the ethanol production in %(v/v) of an about 30 day cultivation grown at 125 μE*m⁻²*s⁻¹ in a 12 h/12 day/night cycle.

[0115] FIG. 86 depicts ADH and PDC activity in TK293, 1578 and 1792.

[0116] FIG. 87 depicts total ethanol production in TK293, 1578 and 1792.

[0117] FIG. 88 depicts ethanol production per OD in TK293, 1578 and 1792.

[0118] FIG. 89 depicts acetaldehyde accumulation of TK293, #1578, #1749, and #1792.

[0119] FIG. 90 depicts ADH activity in TK293, #1578, #1749, and #1792.

[0120] FIG. 91 depicts specific PDC activity in varying amounts of acetaldehyde added to the cells. Acetaldehyde is completely converted to ethanol within 1-2 hours.

[0121] FIG. 92 depicts ADH activity with or without the addition of acetaldehye (3 mM for 5 hours) for strains TK293, #1578, #1749, and #1751 each having different ADH activity levels.

[0122] FIG. 93 depicts PDC activity with or without the addition of acetaldehye (3 mM for 5 hours) for strains TK293, #1578, #1749, and #1751 each having different ADH activity levels.

[0123] FIG. 94 depicts ADH activity of various expressed adh genes, some of which were codon improved for expression in ABICyano1.

[0124] FIG. 95 depicts the effect of ethanol productivity of various ethanologenic ABICyano1 strains in growth media containing 1% vol/vol ethanol.

[0125] FIG. 96 depicts that the ethanol production of ABICyano1 strains 1790, 1791, 1792, 1793, 1794, and 1795 was greater than that of TK293 after about day 10 to about day 31 of growth.

[0126] FIG. 97 depicts the PDC activity in dual PDC strain #1743 with and without induction of a second pdc gene by addition of 6 μM copper at about day 16 and the additional induction with 5 μM copper at about day 30.

[0127] FIG. 98 depicts the total ethanol production of strain #1743 with and without the induction of copper.

[0128] FIG. 99 depicts total ethanol per OD₇₅₀ of strain #1743.

[0129] FIG. 100 depicts growth over 135 days and the addition of copper at days 48, 78 and 106 which caused a slight decrease in the rate of growth of ABICyano1 strain #1743 when compared to the control lacking copper in the growth media.

[0130] FIG. 101 depicts the production of ethanol from strain #1743 over a period of 135 days.

[0131] FIG. 102 depicts the PDC activity in ABICyano1 strain #1743 cells over the course of about 135 days.

[0132] FIG. 103 depicts ethanol per OD₇₅₀ of strain #1743 that was grown for about 135 days and was diluted at about days 48, 78 and 106. As depicted in FIG. 103 the induction of the pdc gene by introduction of copper into the growth media results in an increase in the amount of ethanol produced per OD₇₅₀ of ABICyano1 strain #1743 when compared to the ABICyano1 strain #1743 grown in media lacking copper.

[0133] FIG. 104 depicts the results of various transformation experiments via homologous recombination (HR) events in ABICyano1.

[0134] FIG. 105 depicts a plasmid map of TK471 (pABICyano1::pilT-PrbcLABICyano1_Km**pilC-sacB-oriVT)

[0135] FIG. 106 depicts the plasmid map of TK541 (oriVT_flv3-up_PrbcL-Gm**_flv3-down).

[0136] FIG. 107 depicts a DNA agarose gel of a PCR reaction using two PCR primers including one primer specific for the gentamycin resistance gene and the other primer binding, within the genome of ABICyano1.

[0137] FIG. 108 depicts a plasmid map of TK554 (4oriVTflv3-upPorf0223ABICyano1-zmPDCABICyano1(opt)dsrA-Prbc*(optRBS)-ADH of FIG. 66B (ABICyano1)Prbd_Gm**flv3-down).

[0138] FIG. 109 depicts a plasmid map of TK552 (oriVT_flv3-up_PcpcBABICyano1-Gm**_flv3-down).

[0139] FIG. 110 depicts an agarose gel with lane “1” and “2” being a PCR reaction performed with primers specific for the gene flv3.

[0140] FIG. 111 depicts a plasmid map of TK540 (oriVT_pilT-up_PrbcL-Gm**_pilC-down).

[0141] FIG. 112 is an image of a 0.8% DNA agarose gel that depicts single and double cross over integration of the TK540 plasmid into the genome of ABICyano1 as detected by PCR with primer specific for regions outside the pilT/pilC region.

[0142] FIG. 113 depicts data for various transformation experiments via homologous recombination.

[0143] FIG. 114 depicts PCR-based segregation analysis shows that an ABICyano1 organism transformed with construct TK552 (pOriVT_flv3-up_PcpcB-Gm**_flv3-down) successfully integrated an antibiotic resistance marker gene (Gm**) into to the flv3 gene in the chromosome of ABICyano1 and confirms complete segregation of TK552.5 for all chromosome copies.

[0144] FIG. 115 depicts PCR-based segregation analysis shows that an ABICyano1 organism transformed with construct TK616 (pOriVT_ycf37-up_FRT-PcpcB-Gm**-ter-FRT_ycf37-down) successfully integrated an antibiotic resistance marker gene (Gm**) into to the ycf37 gene in the chromosome of ABICyano1 and confirms complete segregation of TK616.5 for all chromosome copies.

[0145] FIG. 116 depicts PCR-based segregation analysis shows that an ABICyano1 organism transformed with construct TK597 (pOriVT_argH-up_FRT-PcpcB-Gm**-ter-FRT_argH-down) successfully integrated an antibiotic resistance marker gene (Gm**) into to the argH gene in the chromosome of ABICyano1. FIG. 116 also depicts auxotrophy for arginine of the ABICyano1 TK597 strains tested by growing on a BG11 agarose plate lacking arginine.

[0146] FIG. 117 depicts ethanol production of ABICyano1 strains whose ethanologenic capacity was created by homologous recombination using constructs #1817, #1818, #1819 and #1820.

[0147] FIG. 118 depicts a plasmid map of and sequence annotation of plasmid #1658 (pABIcyano1-PnirA2-zmPDC(opt3)-dsrA-Prbc(optRBS)-synADHoop).

[0148] FIG. 119 depicts a plasmid map of and sequence annotation of plasmid #1663 (pABIcyano1-PnirA*4-zmPDC(opt3)-dsrA-Prbc*(optRBS)-synADHoop).

[0149] FIG. 120 depicts a plasmid map of #1697 (pABIcyano1-PnirA*3-zmPDC(opt3)-dsrA-Prbc*(optRBS)-synADHoop).

[0150] FIG. 121 depicts copper-promoter variants with improved RBS.

[0151] FIG. 122 depicts copper-promoter variants with improved −10 region.

[0152] FIG. 123 depicts optimized Porf3126* (PsmtA) promoter variant derived from ABICyano1 Porf3126 used to control PDC activity in construct TK490.

[0153] FIG. 124 depicts PDC activity in Zn²⁺ induced ABICyano1 strains TK490 and #1762.

[0154] FIG. 125 depicts a plasmid map with sequence annotation of plasmid #1646 (pABIcyano1-PnirA-zmPDC(opt1)dsrA-Prbc*(optRBS)-ADH111 (opt)_ter).

[0155] FIG. 126 depicts a plasmid map with sequence annotation of plasmid #1762 (pABIcyano1-Porf3126*-zmPDC(opt1)dsrA-Prbc*(optRBS)-ADH111(opt)\ter.

[0156] FIG. 127 depicts a plasmid map with sequence annotation of plasmid #1753 (pABIcyano1-PnirA-zmPDC(opt1)_dsrA-Prbc*(optRBS)-Adh111_ter).

[0157] FIG. 128 depicts a plasmid map with sequence annotation of plasmid #1754 (pABIcyano1-PnirA-zmPDC(opt1)-dsrA-Pibc*(optRBS)-ADH242(opt)_ter).

[0158] FIG. 129 depicts a plasmid map with sequence annotation of plasmid #1735 (pABIcyano1-Pnith-zmPDC(opt1)_dsrA-Prbc*(optRBS)-Adh1694_ter).

[0159] FIG. 130 depicts a plasmid map with sequence annotation of plasmid #1749 (pABIcyano1-PnirA-zmPDC(Opt3)-dsrA-PrpsL*4-synADHoop).

[0160] FIG. 131 depicts a plasmid map with sequence annotation of plasmid #1790 (pABIcyano1-PnirA-zmPDC(opt3)\dsrA-PcpcB-ADH242(opt)_trbcS).

[0161] FIG. 132 depicts a plasmid map with sequence annotation of plasmid #1791 (pABIcyano1-PnirA-zmPDC(opt3)\dsrA-PcpcB-ADH111(opt)_trbcS).

[0162] FIG. 133 depicts a plasmid map with sequence annotation of plasmid #1792 (pABIcyano1-PnirA-zmPDC(opt3)\dsrA-PcpcB-synADH_trbcS).

[0163] FIG. 134 depicts a plasmid map with sequence annotation of plasmid #1793 (pABIcyano1-PnirA-zmPDC(opt3)\dsrA-PcpcB-Adh916(opt)_trbcS).

[0164] FIG. 135 depicts a plasmid map with sequence annotation of plasmid #1794 (pABIcyano1-PnirA-zmPDC(opt1)\dsrA-PcpcB-ADH1520(opt)_trbcS).

[0165] FIG. 136 depicts a plasmid map with sequence annotation of plasmid #1795 (pABIcyano1-PnirA-zmPDC(opt1)\dsrA-PcpcB-Adh553(opt)_trbcS).

[0166] FIG. 137 depicts a plasmid map with sequence annotation of plasmid #1803 (pABIcyano1-PnirA-zmPDC(opt1)\dsrA-PcpcB-Adh1520_ter).

[0167] FIG. 138 depicts a plasmid map with sequence annotation of plasmid TK539 (oriVT_flv3_up_PrbcL-Km**flv3_down).

[0168] FIG. 139 depicts a plasmid map with sequence annotation of plasmid TK541 (oriVT_flv3_up_PrbcL-Gm**_flv3_down).

[0169] FIG. 140 depicts a plasmid map with sequence annotation of plasmid TK552 (oriVT_flv3_up_PcpcB-Gm**_flv3_down).

[0170] FIG. 141 depicts a plasmid map with sequence annotation of plasmid TK617 (priVT_flv3_up_{—}1kb_FRT-PcpcB-Gm**-tB0014-FRT-flv3_down_{—}1kb).

[0171] FIG. 142 depicts a plasmid map with sequence annotation of plasmid TK618 (oriVT_flv3_up 2kb_FRT-PcpcB-Gm**_tB0014-FRT-flv3_down_{—}2kb).

[0172] FIG. 143 depicts a plasmid map with sequence annotation of plasmid TK619 (oriVT_flv3_up_{—}3kb_FRT-PcpcB-Gin**_ter-FRT-flv3_down_{—}3kb).

[0173] FIG. 144 depicts a plasmid map with sequence annotation of plasmid TK572 (oriVT_recJ_up_FRT-PcpcB-Gm**-tB0014-FRT_recJ_down).

[0174] FIG. 145 depicts a plasmid map with sequence annotation of plasmid TK567 (oriVT_recJ2_up_FRT-PcpcB-Gm**-tB0014-FRT_recJ2_down).

[0175] FIG. 146 depicts a plasmid map with sequence annotation of plasmid TK596 (oriVT_narB_up_FRT-PcpcB-Gm**-tB0014-FRT_narB_down).

[0176] FIG. 147 depicts a plasmid map with sequence annotation of plasmid TK597 (oriVT_argH_up_FRT-PcpcB-Gm**-tB0014-FRT_argH_down).

[0177] FIG. 148 depicts a plasmid map with sequence annotation of plasmid TK598 (oriVT_leuB_up_FRT-PcpcB-Gm**-tB0014-FRT_leuB_down).

[0178] FIG. 149 depicts a plasmid map with sequence annotation of plasmid TK616 (oriVT_ycf37_up_FRT-PcpcB-Gm**-tB0014-FRT_ycf37_down).

[0179] FIG. 150 depicts a plasmid map with sequence annotation of plasmid #1932 (pABIcyano1PnirA*2-zmPDC(opt3)\dsrA-PcpcB-ADH111(opt)_trbcS).

[0180] FIG. 151 depicts a plasmid map with sequence annotation of plasmid #1933 (pABIcyano1-PnirA*2-zmPDC(opt3)\dsrA-PcpcB-Adh916(opt)_trbcS).

[0181] FIG. 152 depicts a plasmid map with sequence annotation of plasmid #1934 (pABIcyano1-PnirA*2-zmPDC(opt1)\dsrA-PcpcB-ADH1520(opt)_trbcS).

[0182] FIG. 153 depicts a plasmid map with sequence annotation of plasmid #1935 (pABIcyano1-Porf0316-zmPDC(opt 3)\dsrA-PcpcB-ADH111 (opt)_trbcS).

[0183] FIG. 154 depicts a plasmid map with sequence annotation of plasmid #1936 (pABIcyano1-Porf0316-zmPDC(opt3)_dsrA-PcpcB-Adh916(opt)_trbcS).

[0184] FIG. 155 depicts a plasmid map with sequence annotation of plasmid #1937 (pABIcyano1-Porf0316-zmPDC(opt1)\dsrA-PcpcB-ADH1520(opt)_trbcS).

[0185] FIG. 156 depicts a plasmid map with sequence annotation of plasmid #1743 (pABIcyano1-PnirA-zmPDC(opt3)dsrA-Prbc*(optRBS)-synADHoop-Porf0221-zmPDC(opt1)dsrA).

[0186] FIG. 157 depicts a plasmid map with sequence annotation of plasmid #1817 (pflv3::PnirA-zmPDC(opt1)_dsrA-Prbc*(optRBS)-synADH\oop-PrbcL-Gm**).

[0187] FIG. 158 depicts a plasmid map with sequence annotation of plasmid #1818 (pflv3::Porf0316-zmPDC(opt1)_dsrA-Prbc*(optRBS)-synADH\oop-PrbcL-Gm**).

[0188] FIG. 159 depicts a plasmid map with sequence annotation of plasmid #1819 (pflv3::PnirA-zmPDC(opt1)_dsrA-Prbc*(optRBS)-synADH\oop-PcpcB-Gm**).

[0189] FIG. 160 depicts a plasmid map with sequence annotation of plasmid #1820 (pflv3::Porf0316-zmPDC(opt1)_dsrA-Prbc*(optRBS)-synADH\oop-PcpcB-Gm**).

[0190] FIG. 161 depicts a plasmid map with sequence annotation of plasmid #1744 (pABIcyano1-PnirA-zmPDC(opt3)-dsrA-Prbc*(optRBS)-synADH\oop-Porf3126-zmPDC(opt1)\dsrA).

[0191] FIG. 162 depicts the ethanologenic activity of ABICyano1 comprising #1772 with the endogenous copper-inducible promoter Porf0316 tested with 20×Cu (6 μM Cu²⁺) at a start OD of 2 either grown with ammonia/urea (2 mM each) or nitrate (BG11 recipe) as the sole nitrogen source.

[0192] FIG. 163 depicts PDC activity of strains #1578, #1743 and #1744 tested with and without induction by nitrate and copper (#1578 and #1743) and with and without induction by nitrate and zinc (#1744).

[0193] FIG. 164 depicts the growth of TK293 (OD at 750 nm) over about 120 days.

[0194] FIG. 165 depicts ethanol production of TK293 and PDC activity of TK293 over about 120 days of cultivation.

### DETAILED DESCRIPTION

[0195] Disclosed herein is an isolated strain of the Cyanobacterium genus, Cyanobacterium sp. ABICyano1 (referred to herein as ABICyano1) as well as genetically enhanced, non-naturally occurring ABICyano1 organisms. Genetically enhanced, non-naturally occurring ABICyano1 organisms disclosed herein are useful for the production of compounds of interest, such as ethanol, for example. ABICyano1 has been analyzed by DNA sequencing and is a member of the genus Cyanobacterium. Cyanobacterium sp. include several species and strains and have been found in a variety of environments including thermal mats in Italy (Moro, et al., 2007, Algological Studies, 123:1-15).

[0196] A deposit of Cyanobacterium sp. strain ABICyano1 (ABICyano1), disclosed herein and recited in the appended claims, has been made with the American Type Culture Collection (ATCC), 10801 University Boulevard, Manassas, Va. 20110. The date of deposit was Nov. 7, 2012. The ATCC accession number is PTA-13311. The deposited Cyanobacterium sp. strain ABICyano1 is not genetically enhanced. The deposit includes 25 2-mL vials, each containing about 1.5 mL of cryopreserved cyanobacterial cells at a concentration of about 2.39×10⁷ cells per mL. To satisfy the enablement requirements of 35 U.S.C. 112, and to certify that the deposit of the present invention meets the criteria set forth in 37 CFR 1.801-1.809, Applicants hereby make the following statements regarding the deposited Cyanobacterium sp. strain ABICyano1 (deposited as ATCC Accession No. PTA-13311):

[0197] 1. During the pendency of this application, access to the invention will be afforded to the Commissioner upon request;

[0198] 2. Upon granting of the patent the deposit will be available to the public under conditions specified in 37 CFR 1.808;

[0199] 3. The deposit will be maintained in a public repository for a period of 30 years or 5 years after the last request or for the effective life of the patent, whichever is longer;

[0200] 4. The viability of the biological material at the time of deposit was tested (see 37 CFR 1.807); and

[0201] 5. The deposit will be replaced if it should ever become unavailable.

[0202] Access to this deposit will be available during the pendency of this application to persons determined by the Commissioner of Patents and Trademarks to be entitled thereto under 37 C.F.R. §1.14 and 35 U.S.C. §122. Upon granting of any claims in this application, all restrictions on the availability to the public of the variety will be irrevocably removed by affording access to a deposit of a sufficient amount of cryopreserved cyanobacterial cells of the same variety with the ATCC.

### DEFINITIONS

[0203] Aspects of the disclosure encompass techniques and methods well known in molecular biology, microbiology and cell culture. Laboratory references for these types of methodologies are readily available to those skilled in the art, see, for example, Molecular Cloning: A Laboratory Manual (Third Edition), Sambrook, J., et al. (2001) Cold Spring Harbor Laboratory Press Current Protocols in Microbiology (2007) Edited by Coico. R, et al., John Wiley and Sons, Inc.; The Molecular Biology of Cyanobacteria (1994) Donald Bryant (Ed.), Springer Netherlands; Handbook Of Microalgal Culture Biotechnology And Applied Phycology (2003) Richmond, A.; (ed.), Blackwell Publishing; and “The Cyanobacteria, Molecular Biology, Genomics and Evolution”. Edited by Antonia Herrero and Enrique Flores, Caister Academic Press, Norfolk, UK, 2008.

[0204] It is well known to a person of ordinary skill in the art that large plasmids can be produced using techniques such as the ones described in the U.S. Pat. No. 6,472,184 B1 titled “Method for Producing Nucleic Acid Polymers” and U.S. Pat. No. 5,750,380 titled “DNA Polymerase Mediated Synthesis of Double Stranded Nucleic Acid Molecules”, which are hereby incorporated by reference in their entirety.

[0205] Genes are disclosed as a three letter lower case name followed by a capitalized letter if more than one related gene exists, for example nirA. The respective protein encoded by that gene is denominated by the same name with the first letter capitalized, such as NirA, or all letters are capitalized.

[0206] Promoter sequences, which control the transcription of a gene, are given by a capitalized letter “P” followed by the subscripted gene name according to the above described nomenclature, for example “P_{nirA}” for the promoter controlling the transcription of the nirA gene. Promoter sequences may also be referred to without the gene name being subscripted, for example “PnirA”.

[0207] Enzyme names can be given in a two or three letter code indicating the origin of the enzyme, followed by the above mentioned three letter code for the enzyme itself, such as SynAdh (Zn²⁺ dependent Alcohol dehydrogenase from Synechocystis PCC 6803), ZmPdc (pyruvate decarboxylase from Zymomonas mobilis).

[0208] All publications and patent applications mentioned in this specification are herein incorporated by reference to the same extent as if each individual publication or patent application was specifically and individually indicated to be incorporated by reference.

[0209] Unless defined otherwise, all technical and scientific terms used herein have the meaning commonly understood by a person skilled in the art to which this disclosure belongs. As used herein, the following terms have the meanings ascribed to them unless specified otherwise.

[0210] The term “about” is used herein to mean approximately, in the region of, roughly, or around. When the term “about” is used in conjunction with a numerical value/range, it modifies that value/range by extending the boundaries above and below the numerical value(s) set forth. In general, the term “about” is used herein to modify a numerical value(s) above and below the stated value(s) by a variance of 20%.

[0211] The term “Cyanobacteria” refers to a member from the group of photoautotrophic prokaryotic microorganisms which can utilize solar energy and fix carbon dioxide. Cyanobacteria are also referred to as blue-green algae.

[0212] The term “terminator” refers to a nucleic acid sequence, at which the transcription of a mRNA stops. Non-limiting examples are dsrA from Escherichia (E. coli), the oop terminator or the rho terminator.

[0213] The term “Cyanobacterium sp.” refers to a member of the genus Cyanobacterium, as, for example, characterized by Rippka et al., 1983. Ann. Microbiol. (Inst. Pasteur) 134B: 32.

[0214] The term “BG-11” or “BG11” refers to a growth media used for growing cyanobacterial species as disclosed in Rippka, R., et al., “Generic Assignments, Strain Histories and Properties of Pure Cultures of Cyanobacteria.” (1979) J. Gen. Microbiol. 111: 1-61.

[0215] The term “mBG-11” or “mBG11” refers to marine BG11 and in may alternatively be referred to as marine medium. mBG11 has from about 30 to about 38 psu (practical salinity units).

[0216] The terms “host cell” and “recombinant host cell” include a cell suitable for metabolic manipulation including, but not limited to, incorporating heterologous polynucleotide sequences and can be transformed. Host cell and recombinant host cell includes progeny of the cell originally transformed. In particular embodiments, the cell is a prokaryotic cell, such as a cyanobacterial cell. The term recombinant host cell is intended to include a cell that has already engineered to have desirable properties and is suitable for further enhancement using the compositions and methods disclosed herein.

[0217] The term “shuttle vector” refers to a vector, such as a plasmid, which can propagate in different host species. For example, a shuttle vector with a cyanobacterial origin of replication can be replicated and propagated in different cyanobacterial genera such as Cyanobacterium, Synechococcus, and Synechocystis. Alternatively, or additionally, a shuttle vector may also contain an origin of replication for different phyla of bacteria such as Enterobacteriaceae and Cyanobacteria, so that cloning/genetic enhancements can performed in E. coli and the recombinant plasmid can be expressed/maintained in cyanobacterial hosts. For example, in the latter case, in certain embodiments, the shuttle vector is either a broad host range vector whose origin of replication is recognized by E. coli and cyanobacteria, or a plasmid which contains at least two different origins of replication for the appropriate organism.

[0218] The term “genome” refers to the chromosomal genome as well as to extrachromosomal plasmids which are normally present in Wild type cyanobacteria without having performed recombinant DNA technology.

[0219] “Competent to express” refers to a host cell that provides a sufficient cellular environ-pent for expression of endogenous and/or exogenous polynucleotides.

[0220] As used herein, the term “genetically enhanced” refers to any change in the endogenous genome (chromosomal and plasmidial) of a wild type cell or to the addition of non-endogenous genetic code to a wild type cell, the introduction of a heterologous gene. Changes to the genome of various organisms disclosed herein are made by the hand of man through the use of various recombinant polynucleotide technologies and other techniques such as mutagenesis, for example. Included in changes to the genomes are changes in protein coding sequences or non-protein coding sequences, including regulatory sequences such as promoters, enhancers or other regulators of transcription.

[0221] The nucleic acids disclosed herein may be modified and/or contain non-natural nucleotide bases.

[0222] As used herein. “substantially similar” refers to nucleic acid fragments wherein changes in one or more nucleotide bases results in substitution of one or more amino acids, but do not affect the functional properties of the protein encoded by the DNA sequences. In certain embodiments, changes in one or more nucleotide bases do not change the encoded amino acid. Substantially similar also refers to modifications of the nucleic acid fragments such as substitution, deletion or insertion of one or more nucleotide bases that do not substantially affect the functional properties of the resulting transcript.

[0223] As used herein, in certain embodiments, homologous nucleic acid sequences are about 60%, 65%, 68%, 70%, 75%, 80%, 85%, 90%, 91%, 92%, 93%, 94%, 95%, 96%, 97%, 98%, 99%, 99.5%, 99.9%, 99.95% or even higher identical to nucleic acids disclosed herein.

[0224] The percentage of identity of two nucleic acid sequences or two amino acid sequences can be determined using the algorithm of Thompson et al. (CLUSTALW, 1994 Nucleic Acid Research 22: 4673-4, 680). A nucleotide sequence or an amino acid sequence can also be used as a so-called “query sequence” to perform a search against public nucleic acid or protein sequence databases in order, for example, to identify further unknown homologous sequences, which can also be used in embodiments of this disclosure. Such searches can be performed using the algorithm of Karlin and Altschul (1999 Proceedings of the National Academy of Sciences 87: 2,264 to 2,268), modified as in Karlin and Altschul (1993 Proceedings of the National Academy of Sciences U.S.A. 90: 5,873 to 5,877). Such an algorithm is incorporated in the NBLAST and XBLAST programs of Altschul et. al. (1999 Journal of Molecular Biology 215: 403 to 410). Where gaps exist between two sequences, gapped BLAST can be utilized as described in Altschul et al. (1997 Nucleic Acid Research, 25: 3,389 to 3,402).

[0225] “Recombinant” refers to polynucleotides synthesized or otherwise manipulated in vitro or in vivo (“recombinant polynucleotides”) and to methods of using recombinant polynucleotides to produce gene products encoded by those polynucleotides in cells or other biological systems. For example, a cloned polynucleotide may be inserted into a suitable expression vector, such as a bacterial plasmid, and the plasmid can be used to transform a suitable host cell. A host cell that comprises the recombinant polynucleotide is referred to as a “recombinant host cell” or a “recombinant bacterium” or a “recombinant cyanobacteria.” The gene is then expressed in the recombinant host cell to produce, e.g., a “recombinant protein.” A recombinant polynucleotide may serve a non-coding function (e.g., promoter, origin of replication, ribosome-binding site, etc.) as well.

[0226] The term “non-naturally occurring”, when used in reference to a microbial organism or microorganism herein is intended to mean that the microbial organism has at least one genetic alteration not normally found in a naturally occurring strain of the referenced species, including wild-type strains of the referenced species. Genetic alterations include, for example, modifications introducing expressible nucleic acids encoding metabolic polypeptides, other nucleic acid additions, nucleic acid deletions and/or other functional disruption of the microbial organism's genetic material. Such modifications include, for example, coding regions and functional fragments thereof, for heterologous, homologous or both heterologous and homologous polypeptides for the referenced species. Additional modifications include, for example, non-coding regulatory regions in which the modifications alter expression of a gene or operon such as regions associated with promoters, for example. Exemplary metabolic polypeptides include enzymes or proteins within an ethanologenic biosynthetic pathway resulting in the production of ethanol by a non-naturally occurring organism.

[0227] The term “recombinant nucleic acid molecule” includes a nucleic acid molecule (e.g., a DNA molecule) that has been altered, modified or engineered such that it differs in nucleotide sequence from the native or natural nucleic acid molecule from which the recombinant nucleic acid molecule was derived (e.g., by addition, deletion or substitution of one or more nucleotides).

[0228] The term “transformation” is used herein to mean the insertion of heterologous genetic material into the host cell. Typically, the genetic material is DNA on a plasmid vector, but other means can also be employed. General transformation methods and selectable markers for bacteria and cyanobacteria are known in the art (Wirth, Mol Gen Genet. 216:175-177 (1989); Koksharova, Appl Microbiol Biotechnol 58:123-137 (2002). Additionally, transformation methods and selectable markers for use in bacteria are well known (see, e.g., Sambrook et al, supra).

[0229] The term “homologous recombination” refers to the process of recombination between two nucleic acid molecules based on nucleic acid sequence similarity. The term embraces both reciprocal and nonreciprocal recombination (also referred to as gene conversion). In addition, the recombination can be the result of equivalent or non-equivalent cross-over events. Equivalent crossing over occurs between two equivalent sequences or chromosome regions, whereas nonequivalent crossing over occurs between identical (or substantially identical) segments of nonequivalent sequences or chromosome regions. Unequal crossing over typically results in gene duplications and deletions. For a description of the enzymes and mechanisms involved in homologous recombination see Court et al., “Genetic engineering using homologous recombination,” Annual Review of Genetics 36:361-388; 2002.

[0230] The term “non-homologous or random integration” refers to any process by which DNA is integrated into the genome that does not involve homologous recombination. It appears to be a random process in which incorporation can occur at any of a large number of genomic locations.

[0231] The term “vector” as used herein is intended to refer to a nucleic acid molecule (polynucleotides and oligonucleotides) capable of transporting another nucleic acid to which it has been linked. One type of vector is a “plasmid,” which generally refers to a circular double stranded DNA molecule into which additional DNA segments may be ligated, but also includes linear double-stranded molecules such as those resulting from amplification by the polymerase chain reaction (PCR) or from treatment of a circular plasmid with a restriction enzyme.

[0232] Some vectors are capable of autonomous replication in a host cell into which they are introduced (e.g., vectors having an origin of replication which functions in the host cell). Other vectors can be integrated into the genome of a host cell upon introduction into the host cell, and are thereby replicated along with the host genome. Moreover, certain vectors are capable of directing the expression of genes to which they are operatively linked. Such vectors are referred to herein as “recombinant expression vectors” (Or simply “expression vectors”).

[0233] The term “promoter” is intended to include a polynucleotide segment that can transcriptionally control a gene of interest, e.g., a pyruvate decarboxylase gene that it does or does not transcriptionally control in nature. In one embodiment, the transcriptional control of a promoter results in an increase in expression of the gene of interest. In an embodiment, a promoter is placed 5′ to the gene of interest. A heterologous promoter can be used to replace the natural promoter, or can be used in addition to the natural promoter. A promoter can be endogenous with regard to the host cell in which it is used or it can be a heterologous polynucleotide sequence introduced into the host cell, e.g., exogenous with regard to the host cell in which it is used. Promoters may also be inducible, meaning that certain exogenous stimuli (e.g., nutrient starvation, heat shock, mechanical stress, light exposure, etc.) will induce the promoter leading to the transcription of an operably linked gene.

[0234] The phrase “operably linked” means that the nucleotide sequence of the nucleic acid molecule or gene of interest is linked to the regulatory sequence(s), e.g., a promoter, in a manner which allows for regulation of expression (e.g., enhanced, increased, constitutive, basal, attenuated, decreased or repressed expression) of the nucleotide sequence and expression of a gene product encoded by the nucleotide sequence (e.g., when the recombinant nucleic acid molecule is included in a recombinant vector, as defined herein, and is introduced into a microorganism).

[0235] The term “gene” refers to an assembly of nucleotides that encode for a polypeptide, and includes cDNA and genomic DNA nucleic acids. “Gene” also refers to a nucleic acid fragment that expresses a specific protein or polypeptide, including regulatory sequences preceding 5′ non-coding sequences) and following (3′ non-coding sequences) the coding sequence.

[0236] The term “exogenous” as used herein is intended to mean that the referenced molecule or the referenced activity is introduced into the host microbial organism. The molecule can be introduced, for example, by introduction of an encoding nucleic acid into the host cell genetic material such as by integration into a host chromosome or as non-chromosomal genetic material such as a plasmid. Therefore, the term as it is used in reference to expression of an encoding nucleic acid refers to introduction of the encoding nucleic acid in an expressible form into the microbial organism. When used in reference to a biosynthetic activity, the term refers to an activity that is introduced into the host reference organism. The source can be, for example, a homologous or heterologous encoding nucleic acid that expresses the referenced activity following introduction into the host microbial organism. Therefore, the term “endogenous” refers to a referenced molecule or activity that is present in the host. Similarly, the term when used in reference to expression of an encoding nucleic acid refers to expression of an encoding nucleic acid contained within the microbial organism. The term “heterologous” refers to a molecule or activity derived from a source other than the referenced species whereas “homologous” refers to a molecule or activity derived from the host microbial organism. Accordingly, exogenous expression of an encoding nucleic acid of the invention can utilize either or both a heterologous or homologous encoding nucleic acid.

[0237] The term “fragment” refers to a nucleotide sequence of reduced length relative to the reference nucleic acid and comprising, over the common portion, a nucleotide sequence substantially identical to the reference nucleic acid. Such a nucleic acid fragment according to the disclosure may be included in a larger polynucleotide of which it is a constituent. Such fragments comprise, or alternatively consist of, oligonucleotides ranging in length from at least about 6 to about 1500 or more consecutive nucleotides of a polynucleotide according to the disclosure.

[0238] The term “open reading frame” abbreviated as “ORF,” refers to a length of nucleic acid sequence, either DNA, cDNA or RNA that contains a translation start signal or initiation codon, such as an ATG or AUG, and a termination codon and can be potentially translated into a polypeptide sequence.

[0239] The term “upstream” refers to a nucleotide sequence that is located 5′ to a reference nucleotide sequence. In particular, upstream nucleotide sequences generally relate to sequences that are located on the 5′ side of a coding sequence or starting point of transcription. For example, most promoters are located upstream of the start site of transcription.

[0240] The term “downstream” refers to a nucleotide sequence that is located 3′ to a reference nucleotide sequence. In particular, downstream nucleotide sequences generally relate to sequences that follow the starting point of transcription. For example, the translation initiation codon of a gene is located downstream of the start site of transcription.

[0241] The terms “restriction endonuclease” and “restriction enzyme” refer to an enzyme that binds and cuts within a specific nucleotide sequence within double stranded DNA.

[0242] The term “expression” as used herein, refers to the transcription and stable accumulation mRNA derived from a nucleic acid or polynucleotide. Expression may also refer to translation of mRNA into a protein or polypeptide. Expression may also be used to refer to the process by which a genes coded information is converted into the structures and functions of a cell, such as a protein, transfer RNA, or ribosomal RNA.

[0243] An “expression cassette” or “construct” refers to a series of polynucleotide elements that permit transcription of a gene in a host cell. Typically, the expression cassette includes a promoter and a heterologous or native polynucleotide sequence that is transcribed. Expression cassettes or constructs may also include. e.g., transcription termination signals, polyadenylation signals, and enhancer elements.

[0244] The term “codon bias” refers to the fact that different organisms use different codon frequencies.

[0245] The term “codon improvement” refers to the modification of at least some of the codons present in a heterologous gene sequence from a triplet code that is not generally used in the host organism to a triplet code that is more common in the particular host organism. This can result in a higher expression level of the gene of interest. The term “codon improvement” can also be used synonymously with codon optimization.

[0246] The term “reporter gene” refers to a nucleic acid encoding an identifying factor that can be identified based upon the reporter gene's effect, in order to determine or confirm that a cell or organism contains the nucleic acid of interest, and/or to measure gene expression induction or transcription.

[0247] The term “selectable marker” means an identifying factor, usually an antibiotic or chemical resistance gene, that is able to be selected for based upon the marker gene's effect, such as resistance to an antibiotic, resistance to a herbicide, colorimetric markers, enzymes, fluorescent markers, and the like, wherein the effect is used to track the inheritance of a nucleic acid of interest and/or to identify a cell or organism that has inherited the nucleic acid of interest.

[0248] A “heterologous protein” refers to a protein not naturally produced in the cell.

[0249] An “isolated polypeptide” or “isolated protein” is a polypeptide or protein that is substantially free of those compounds that are normally associated therewith in its natural state (e.g., other proteins or polypeptides, nucleic acids, carbohydrates, lipids).

[0250] An “isolated organism” is an organism that is substantially free of other organisms that are normally associated therewith in its natural state.

[0251] The term “tolerate” refers to the ability of an organism to continue to grow after exposure to a condition. In one embodiment, “tolerate” is defined as the ability of an organism to grow after being exposed to an environmental condition after being exposed to the condition for at least 2 hours per day over a time period of at least 7 days. In another embodiment, “tolerate” is synonymous with withstand. In an embodiment ability of an organism to tolerate environmental conditions is refereed to as “hardiness”.

[0252] A “variant” of a polypeptide or protein is any analogue, fragment, derivative, or mutant which is derived from a polypeptide or protein and which retains at least one biological property of the polypeptide or protein. Different variants of the polypeptide or protein may exist in nature. These variants may be allelic variations characterized by differences in the nucleotide sequences of the structural gene coding for the protein, or may involve differential splicing or post-translational modification. The skilled artisan can produce variants having single or multiple amino acid substitutions, deletions, additions, or replacements.

[0253] As used herein, the term “VLE” stands for vapor-liquid equilibrium. VLE is a method of determining ethanol concentration in a medium by measuring the ethanol concentration in a vapor over the medium. VLE relies upon the vapor pressure of ethanol in a medium and other variables such as temperature and exchange of other gasses in the vapor. In one embodiment, ethanol concentration of the vapor phase over the medium is measured by gas chromotagraphy. In another embodiment. Raman spectroscopy, infrared spectroscopy and other spectrographic analyses may be performed in order to determine the concentration of a compound of interest in the vapor phase over a medium.

[0254] As used herein, the phrase “increased activity” refers to any genetic modification resulting in increased levels of enzyme function in a host cell. As known to one of ordinary skill in the art in certain embodiments, enzyme activity may be increased by increasing the level of transcription, either by modifying promoter function or by increasing gene copy number, increasing translational efficiency of an enzyme messenger RNA, e.g., by modifying ribosomal binding, or by increasing the stability of an enzyme, which increases the half-life of the protein, leading to the presence of more enzyme molecules in the cell. All of these represent non-limiting examples of increasing the activity of an enzyme, see for example, mRNA Processing and Metabolism: Methods and Protocols, Edited by Daniel R. Schoenberg, Humana Press Inc., Totowa, N.J.; 2004; ISBN 1-59259-750-5; Prokaryotic Gene Expression (1999) Baumberg, S., Oxford University Press, ISBN 0199636036; The Biomedical Engineering Handbook (2000) Bronzino, J. D., Springer, ISBN 354066808X, all of which are incorporated by reference.

[0255] The terms “pyruvate decarboxylase”, “Pdc” and “PDC” refer to an enzyme that catalyzes the decarboxylation of pyruvic acid to acetaldehyde and carbon dioxide. A “pdc gene” refers to the gene encoding an enzyme that catalyzes the decarboxylation of pyruvic acid to acetaldehyde and carbon dioxide.

[0256] The terms “alcohol dehydrogenase”, “Adh” and “ADH” refer to an enzyme that catalyzes the interconversion between alcohols and aldehydes or ketones. An “adh gene” refers to the gene encoding an enzyme that catalyzes the interconversion between alcohols and aldehydes or ketones.

[0257] The term “pdc/adh” refers to the pdc and adh genes collectively. A “pdc/adh cassette” refers to a nucleic acid sequence encoding a PDC enzyme and an ADH enzyme.

[0258] The term “ethanologenic cassette” refers to any polynucleotide sequence that encodes for enzymes capable of producing ethanol alone or in combination with other exogenous or endogenous enzymes. In a certain embodiment, an ethanologenic cassette comprises genes encoding for an alcohol dehydrogenase and a pyruvate decarboxylase. In another embodiment, an ethanologenic cassette comprises genes encoding for a bifunctional alcohol/aldehyde dehydrogenase. In certain embodiments, an ethanologenic cassette comprises genes encoding for enzymes that are part of a biochemical pathway to generate precursors for alcohol dehydrogenases and pyruvate decarboxylases of an ethanologenic cassette.

[0259] The term “primer” is an oligonucleotide that hybridizes to a target nucleic acid sequence to create a double stranded nucleic acid region that can serve as an initiation point for DNA synthesis under suitable conditions. Such primers may be used in a polymerase chain reaction.

[0260] The term “polymerase chain reaction,” also termed “PCR,” refers to an in vitro method for enzymatically amplifying specific nucleic acid sequences. PCR involves a repetitive series of temperature cycles with each cycle comprising three stages: denaturation of the template nucleic acid to separate the strands of the target molecule, annealing a single stranded PCR oligonucleotide primer to the template nucleic acid, and extension of the annealed primer(s) by DNA polymerase. PCR provides a means to detect the presence of the target molecule and, under quantitative or semi-quantitative conditions, to determine the relative amount of that target molecule within the starting pool of nucleic acids.

[0261] Database entry numbers as used herein may be from the NCBI database (National Center for Biotechnology Information; http://www.ncbi.nlm.nih.gov) or from the CyanoBase, the genome database for cyanobacteria ((http://bacteria.kazusa.or.jp/cyanobase/index.html); Yazukazu et al. “CyanoBase, the genome database for Synechocystis sp. Strain PCC6803: status for the year 2000”, Nucleic Acid Research, 2000, Vol. 18, page 72).

[0262] The enzyme commission numbers (EC numbers) cited throughout this patent application are numbers which are a numerical classification scheme for enzymes based on the chemical reactions which are catalyzed by the enzymes.

### Growth of ABICyano1 in Adverse Environmental Conditions

[0263] In comparison to other cyanobacterial species, ABICyano1 grows quickly and can tolerate and grow over a large range of various environmental stresses related to temperature, salinity, light intensity, oxygen levels, pH and the presence of contaminants including chemical and microbial contaminants. ABICyano1's ability to tolerate wide-ranging environmental parameters makes it ideally suited to growth in cyanobacterial culture systems. ABICyano1 can be genetically enhanced to express endogenous and exogenous genes used for the production of compounds of interest, such as biofuels, and still tolerates and grows over a large range of various environmental stresses related to temperature, salinity, light intensity, oxygen levels, pH and the presence of various contaminants.

[0264] Methods for cultivation of cyanobacteria in liquid media and on agarose-containing plates are well known to those skilled in the art (see, e.g., websites associated with ATCC). Any of these methods or media maybe used to culture ABICyano1 or derivatives thereof. A number of known recipes for cyanobacterial growth medium can be used. In an embodiment, BG11 medium is used for growing ABICyano1, see Stanier, R. Y., et al., Bacteriol. Rev. 1971, 35: 171-205, which is hereby incorporated by reference.

[0265] In an embodiment, the cyanobacterial strain is a fresh water strain, and BG11 is used. In another embodiment, the cyanobacteria culture grows best in a marine (salt water) medium, by adding an amount of salt to the BG11 medium. In an embodiment, marine BG11 (mBG11) contains about 35 practical salinity units (psu), see Unesco, The Practical Salinity Scale 1978 and the International Equation of State of Seawater 1980. Tech. Pap. Mar. Sci. 1981, 36: 25 which is hereby incorporated by reference.

[0266] In an embodiment, the cells are grown autotrophically, and the only carbon source is CO₂. In another embodiment, the cells are grown mixotrophically, for example with the addition of another carbon source such as glycerol.

[0267] The cultures can be grown indoors or outdoors. The light cycle can be set as for continuous light, or for periodic exposure to light, e.g., 16 hours on and 8 hours off, or 14 hours on and 10 hours off, or 12 hours on and 2 hours off, or any alternative variation of on and off hours of light comprising about a day.

[0268] The cultures can be axenic, or the cultures can also contain other contaminating species.

[0269] In an embodiment, the cyanobacteria are grown in enclosed bioreactors in quantities of at least about 1 L, 20 L, 50 L, 100 L, 500 L, 1000 L, 2000 L, 5000 L, or more. In a preferred embodiment the bioreactors are about 20 L to about 100 L. In an embodiment, the cyanobacterial cell cultures are grown in disposable, flexible, and tubular photobioreactors made of a clear plastic material.

[0270] In another embodiment, cultures are grown indoors or outdoors with continuous light, in a sterile environment. In another embodiment, the cultures are grown outdoors in an open pond type of photobioreactor.

[0271] ABICyano1 cells are generally coccoid in appearance. ABICyano1 cells are sheathed with copious amounts of mucilaginous extracellular material (extracellular polymeric substances, also referred to as exopolysaccharides (referred to herein generally as EPS)), as shown in FIG. 1. This material may help the cells survive in adverse environmental conditions. This mucilage can participate in the formation of cellular aggregates or “clumps”. FIG. 1 depicts a panel of microscopic images that demonstrate the presence of the EPS layer that is present in a sheath surrounding the Cyanobacterium sp. ABICyano1 cell wherein the bar depicted in the figure is equal to 50 μm. The left panel depicts unstained ABICyano1 cells. The right panel depicts ABICyano1 cells that are stained with scribtol black which cannot penetrate the EPS layer and thus depicts the thick EPS layer of ABICyano1.

[0272] ABICyano1 grows over a broad range of temperatures. In a particular embodiment, ABICyano1 can grow from about 1° C. to about 55° C., from about 5° C. to about 55° C., from about 10° C. to about 55° C., from about 15° C. to about 55° C., from about 20° C. to about 55° C., from about 25° C. to about 55° C., from about 30° C. to about 55° C., from about 35° C. to about 55° C., from about 40° C. to about 55° C., from about 45° C. to about 55° C., or from about 50° C. to about 55° C. In an embodiment, as depicted in FIG. 2A ABICyano1 can grow up to about 55° C., e.g. at temperatures greater than 45° C. or greater than 50° C. including 48° C., 50° C., 53° C., and 55° C. The broad temperature range at which ABICyano1 can grow is larger than many other cyanobacteria. For example, as depicted in FIG. 2B, Synechococcus sp. PCC 7002 exhibits growth only up to 45° C. whereas ABICyano1. (FIG. 2A) exhibits robust growth at 50° C. As depicted in FIG. 2, to the test for temperature tolerance, ABICyano1 and Synechococcus sp. PCC 7002 were cultured in a medium. e.g. A Marine medium, under conditions of light illumination and omitting light illumination (day/night cycle) at maximum temperatures between 45 to 55° C. for a certain period of time, for example 1 to 2 hours, during illumination. Cyanobacterial cells were deemed to have passed the test, if the cultures were still growing after having been subjected to 7 days of day/night cycles as described above. Growth could be detected, for example, by an increase in the chlorophyll content of the cyanobacterial cultures. Cyanobacterium sp. ABICyano1 was found to withstand cultivation at 48° C., 50° C. and 53 to 55° C. for at least 2 hours per day over a time period of at least 7 days. As depicted in FIG. 2A, Cyanobacterium sp. ABICyano1 grows well even when daytime temperatures get up to about 45° C. to 50° C. for about 2 hours. Growth was measured by chlorophyll content (diamonds; μg/mL) and absorbance at OD₇₅₀ (squares).

[0273] In another embodiment, ABICyano1 growth was determined at 45° C., 48° C., 50° C., 53° C., and 55° C. for 1 week and compared to the growth of Synechocystis sp. PCC 6803 and Synechococcus sp. PCC 7002 under the same conditions. Table 1 depicts that ABICyano1 is capable of growth even after being exposed daily to 53° C. and 55° C. for two hours over the course of a week.

TABLE 1

| | Thermotolerance Test | | | | |
|---|---|---|---|---|---|
| | 2 hours | 2 hours | 2 hours | 2 hours | 2 hours |
| | at 45° | at 48° | 50° | at 53° | at 55° |
| | C. for | C. for | C. for | C. for | C. for |
| Genus, species | 1 week | 1 week | 1 week | 1 week | 1 week |
| Synechocystis | pos. | pos. | neg. | | |
| sp. PCC 6803 | | | | | |
| Synechococcus | pos. | pos. | pos. | neg. | |
| sp. PCC 7002 | | | | | |
| Cyanobacterium | pos. | pos. | pos. | pos. | pos. |
| sp. ABICyano1 | | | | | |

[0274] ABICyano1 was further tested for its ability to tolerate and grow in various environmental conditions. Some of the conditions tested would likely be present in large-scale culture systems, such as photobioreactors in outdoor conditions, for growing cyanobacteria including ranges of temperatures, oxygen levels, light levels, pH levels, and the presence of contaminants. ABICyano1 grows in various media containing various concentrations of salts. In a particular embodiment, ABICyano1 can grow in fresh water media containing salts at less than about 0.5 parts per thousand, brackish water containing salts at from about 0.5 parts per thousand to about 30 parts per thousand, and saline water containing salts from about 30 parts per thousand to about 50 parts per thousand. In some embodiments, ABICyano1 is grown in media including freshwater BG11 and marine (saline) BG11 (mBG11) medium, which can, for example, have a salinity of between about 30 to 38 psu (practical salinity units also measured as water containing salts at 30 to 38 parts per thousand), in particular 35 psu.

[0275] In an embodiment, ABICyano1 can grow in media containing from about zero percent ethanol up to at least 1% ethanol. ABICyano1 was shown to survive exposure to at least 1% (v/v) ethanol in a BG11 medium, for example. This culturing was done for at least 6 weeks, at least 12 weeks, or at least 16 weeks. In a particular embodiment. ABICyano1 cells were grown at 250 μmolE m⁻² sec⁻¹, a 12 hours of light and 12 hours with no light cycle, at 37° C. with ethanol supplemented in the growth media. The test for ethanol tolerance was performed by adding 1% ethanol to the growth medium of ABICyano1. Cyanobacterial cultures were examined, for example under the microscope after a predetermined period of time, for example 6, 12 or 16 weeks and cyanobacterial cultures were deemed to have passed the ethanol tolerance test if at least or more than 50% of the cyanobacterial cells were found to be intact, i.e. viable according to microscopic analysis meaning that the cell morphology did not change significantly, the cells were still green, and the cells were not lysed.

[0276] In an embodiment, ABICyano1 can grow in the absence of oxygen all the way up to media containing oxygen concentrations of about 1000 μmol/L or more. Oxygen tolerance testing showed that ABICyano1, can tolerate purging with 60% to 80% (v/v) oxygen (resulting in oxygen levels of up to 1000 μmol/L in the culture dining the day) when cultured at temperatures between 28° C. to 37° C. and when being illuminated with a light intensity of between 200 μE m⁻² s⁻¹ to 400 μE m⁻² s⁻¹ in a medium such as marine BG11 or, in some embodiments. BG11 medium. In another embodiment. ABICyano1 can tolerate oxygen levels of about 100 μmol/L, 200 μmol/L, 300 μmol/L, 400 μmol/L, 500 μmol/L, 600 μmol/L, 700 μmol/L, 800 μmol/L, and about 900 μmol/L in the growth medium.

[0277] ABICyano1 was also shown to tolerate a wide range of pH values and can be cultured at neutral or a slightly alkaline pH of 7.5, a pH between 6 to 7.5, and at a pH between 5.5 to 10, about 6, about 7, about 8, about 9, or about 10.

[0278] ABICyano1 cultures are resistant to the growth of contaminating microbial organisms. For example, contaminating strains in ABICyano1 cultures do not grow to as high density as compared to contaminant strains in other cultures of known cyanobacterial strains. As an example of the resistance of growth of microbial organisms in an ABICyano1 culture, about 10⁵-10⁶ cfu/mL of contaminating strains were found in ABICyano1 cultures and about 10⁹-10¹⁵ cfu/mL of contaminating strains were found in Synechococcus sp. PCC 7002 cultures.

[0279] In an embodiment, ABICyano1 host cells, can withstand at least one of the following culturing conditions: 1% (v/v) ethanol in the medium for at least 6, 12 or 16 weeks; 48° C., 50° C., 53 to 55° C. for at least 2 hours per day over a time period of at least 7 days, and purging with 60% to 80% (v/v) oxygen (resulting in oxygen concentrations of up to 1000 μmol/L in the culture during the day). In an embodiment, the Cyanobacterium sp., in particular ABICyano1 host cells, can tolerate at least two of the above mentioned culturing conditions. In an embodiment, the Cyanobacterium sp., in particular ABICyano1 host cells, can tolerate all of the above mentioned culturing conditions.

[0280] The tolerance (also referred to as hardiness) to a wide range of growth temperatures, and tolerance to environmental conditions in general, make Cyanobacterium sp. ABICyano1 amenable to industrial scale production of compounds of interest in potentially adverse environmental conditions such as those found in photobioreactors.

### ABICyano1 Endogenous Plasmids

[0281] ABICyano1 contains two endogenous plasmids. In combination with other genotypic and phenotypic attributes, these two endogenous plasmids differentiate ABICyano1 from other Cyanobacterium species.

[0282] One plasmid is 6828 base pairs (SEQ ID NO: 1) and the other plasmid is 35,386 base pairs (SEQ ID NO: 2). The 6828 bp endogenous plasmid (SEQ ID NO: 1) is alternatively referred to herein as pABICyano1, p6.8 or 6.8. A plasmid map of the 6828 endogenous plasmid is depicted in FIG. 3

[0283] The p6.8 endogenous plasmid was isolated by an in vitro transposition reaction with an EZ-Tn5 R6K γ Ori/Kan-2 transposition kit from Epicentre (Madison Wis., USA) by following the manufacturer's protocol. The cyanobacterial plasmid was rescued in surrogate E. coli host cells. The sequence and site of the captured plasmid was confirmed and validated by PCR, as well as by comparison with available genome sequence data.

[0284] ABICyano1 endogenous plasmid p6.8 contains six open reading frames ORF 1, ORF 2, ORF 3, ORF 4, ORF 5, and ORF 6 encoding for polypeptides having sequences as set forth in SEQ ID NO: 3, SEQ ID NO: 4, SEQ ID NO: 5, SEQ ID NO: 6, SEQ ID NO: 7, and SEQ ID NO: 8, respectively. With respect to the nucleotide sequence of SEQ ID NO: 1 of p6.8, ORF 1 consists of nucleotides 594 to 3779, ORF 2 consists of nucleotides 3815 to 4000. ORF 3 consists of nucleotides 4260 to 5024. ORF 4 consists of nucleotides 5350 to 6036. ORF 5 consists of nucleotides 6078 to 6341. ORF 6 consists of nucleotides 6338 to 6586, and the origin of replication consists of nucleotides 3375 to 3408.

[0285] As disclosed herein, plasmid 6.8 has been modified in vivo and in vitro for use as a plasmid vector containing genes of interest for the production of compounds of interest.

[0286] In an embodiment, a modified endogenous vector derived from p6.8 from ABICyano1 was developed. The modified endogenous vector from ABICyano1 can be used to transform cyanobacteria from a broad range of genera, including ABICyano1 itself.

[0287] In certain embodiments, the present invention includes the p6.8 plasmid and modified vectors comprising sequences of the p6.8 plasmid. In an embodiment, the modified endogenous vector contains at least one of the following: a recombinant gene that encodes at least one protein involved in a biosynthetic pathway for the production of a compound or a marker protein; and an origin of replication suitable for replication in ABICyano1.

[0288] In certain embodiments, a gene coding for a replication initiation factor that binds to the origin of replication can either be present on the modified endogenous vector or can be present in the chromosomes or other extrachromosomal plasmids of ABICyano1. An origin of replication suitable for replication in ABICyano1 and the gene coding for the replication initiation factor binding to that origin of replication ensure that the modified endogenous vector can be replicated in ABICyano1.

[0289] In an embodiment, the nucleotide sequence of an origin of replication of the modified endogenous plasmid vector can have at least 80%, 90%, and 95% identity or can be identical to the nucleotides 3375 to 3408 of the sequence of the endogenous 6.8 kb plasmid (SEQ ID NO: 1).

[0290] In an embodiment, the sequence of the gene coding for the replication initiation factor has at least 80%, 90%, and 95% identity or is identical to nucleotides 594 to 3779 of the sequence of the endogenous 6.8 kb plasmid (SEQ ID NO: 1). In an embodiment, the gene coding for the replication initiation factor codes for a protein having at least 80%, 90%, and 95% sequence identity or is identical to the protein coded by nucleotides 594 to 3779 of the sequence of the endogenous 6.8 kb plasmid (SEQ ID NO: 1) of ABICyano1. This putative initiation replication factor is thought to bind to the putative origin of replication, thereby ensuring the replication of a plasmid containing the initiation factor in ABICyano1.

[0291] In an embodiment, a modified endogenous plasmid vector can contain a sequence having at least 50%, at least 55%, at least 60%, at least 65%, at least 70%, at least 75%, at least 80%, at least 85%, at least 90% or at least 95% identity to the sequence of the endogenous 6.8 kb plasmid (SEQ ID NO: 1). In another embodiment, the modified endogenous vector contains the entire p6.8 endogenous plasmid from ABICyano1.

[0292] In another embodiment, gene delivery vehicles that are developed using the endogenous 6.8 kb plasmid (or a portion of the plasmid) containing characteristic portions of the endogenous 6.8 kb plasmid may be able to be efficiently transformed into a wide range of cyanobacteria. In an embodiment, characteristic portions of the 6.8 kb endogenous plasmid from ABICyano1 include portions that enable it to replicate in a host cell (origin of replication and replication initiation factor, for example) and can be referred to as the backbone of the endogenous 6.8 kb plasmid. Such vectors may also be able to efficiently produce heterologous proteins and other compounds of interest in cyanobacterial cultures.

[0293] In another embodiment, modifications starting with the backbone of the 6.8 kb endogenous plasmid from ABICyano1 are performed individually or together to increase transformation efficiency, increase the replication rate within the cell, and to increase the production of a desired product from the cyanobacterial cell. Suitable modifications include, for example, insertion of selection markers (such as antibiotic resistance genes), recombinant genes or cassettes for the production of a desired compound, and other modifications to increase the expression or stability of the plasmid in the cyanobacterial cell. In an embodiment, the invention includes cyanobacteria, e.g. ABICyano1, comprising a modified p6.8 plasmid having any of these improved characteristics.

[0294] In yet another embodiment, codon improvement of the at least one recombinant gene is performed for improved expression in the cyanobacterial host cell. Codon improvement can also be performed by adapting the codon usage of the at least one recombinant gene to the codon usage in Cyanobacterium sp., in particular ABICyano1. In an embodiment, the G and/or C wobble bases in the codons for the amino acids in the at least one recombinant gene can be replaced by A and/or T because the GC content of the genome of ABICyano1 is relatively low at about 36%.

[0295] In an embodiment, only 2% to 6% or 1% to 10% of the codons of variants of recombinant genes are codon improved. In another embodiment, highly codon improved variants of recombinant genes, at least 25%, to at least 50%, 65% or even at least 70% of the codons have been changed. In another embodiment, recombinant genes are used which are not codon improved.

### Phylogenetic Classification of ABICyano1

[0296] FIG. 4 depicts a phylogenetic tree showing the relationship between ABICyano1 and other cyanobacterial genera and species. As depicted in FIG. 4, ABICyano1 is a member of the Cyanobacterium genus. The tree was built with the 16S rRNA gene sequences with the Neighbor-Joining method using the Tamura-Nei nucleotide substitution model assuming uniform heterogeneity among sites. The scale bar indicates the number of substitutions per site.

[0297] ABICyano1 differs in many ways from other species in the Cyanobacterium genus, as well as from other cyanobacterial genera such as Synechococcus and Synechocystis. Differences include, but are not limited to, endogenous plasmids, carotenoid and chlorophyll composition, and differences in its 16S rDNA and internal transcribed spacer rDNA (ITS), for example.

[0298] FIG. 5 depicts a sequence comparison of the 16S rDNA of ABICyano1 with 16S rDNA from other Cyanobacterium species. The 16S rRNA gene sequences (16S rDNA) of ABICyano1 were predicted from the genome sequence with RNAmmer program (Lagesen K, et al. (2007) Nucleic Acids Research 35(9):3100-3108). The predicted sequences were then used as a query to search against the NCBI database. 16S rDNA sequences from four species belonging to the genus Cyanobacterium were retrieved as the top BLAST hits. Cyano 10216 is the 16S rDNA sequence of Cyanobacterium sp. MBIC10216, accession number AB058249.1. CyanoETS-03 is the 165 rDNA sequence of Cyanobacterium aponinum ETS-03, accession number AM238427.1. CyanoLLi5 is the 16S rDNA sequence of Cyanobacterium sp. LLi5, accession number DQ786164.1. Cyano7202 is the 16S rDNA sequence for Cyanobacterium stanieri NT 7202, accession number AM258981.1. According to this one comparative phylogenetic characteristic, and as depicted in FIG. 5, ABICyano1 is about 99% identical to the 16S rDNA of other species from the genus Cyanobacterium including Cyanobacterium IHB-410. Cyanobacterium aponinum ETS-03, and Cyanobacterium sp. MBIC10216.

### Transformation of ABICyano1

[0299] Some strains of cyanobacteria can be transformed through natural uptake of exogenous DNA. Other cyanobacterial strains can be transformed, for example, by the use of conjugation or electroporation. Some cyanobacterial strains are difficult to transform by any known means. For many of these types of difficult to transform strains, specific methods of preparing the cells for transformation, as well as specific methods of allowing entry of the foreign DNA into the cells, need to be designed de novo.

[0300] ABICyano1 is very difficult to transform. The mucilaginous sheath may play a role in the transformation difficulties, as may the presence of restriction enzyme systems. Nevertheless, disclosed herein are compositions and methods for transforming ABICyano1 with endogenous and exogenous DNA.

[0301] Methods for producing a genetically enhanced, non-naturally occurring Cyanobacterium sp. and ABICyano1 host cells are disclosed herein. In an embodiment, methods include introducing a recombinant nucleic acid sequence into a cyanobacterial host cell. At least one recombinant gene can be introduced into the host cells through the transformation of the host cell by an extrachromosomal plasmid. In an embodiment the extrachromosomal plasmid can independently replicate in the host cell. In another embodiment, at least one recombinant gene can be introduced into the genome of the host cell. In yet another embodiment, at least one recombinant gene is introduced into the genome of the host cell by homologous recombination.

[0302] In an embodiment, a recombinant nucleic acid sequence can be provided as part of an extrachromosomal plasmid containing cyanobacterial nucleic acid sequences in order to increase the likelihood of success for the transformation.

[0303] In another embodiment, the method for producing a genetically enhanced Cyanobacterium sp. host cell uses an extrachromosomal plasmid derived from an endogenous plasmid of the host cell to introduce a recombinant nucleic acid sequence into the host cell. This endogenous plasmid can be, for example, an extrachromosomal plasmid derived from the 6.8 kb endogenous plasmid of ABICyano1.

[0304] In yet another embodiment, the method for producing a genetically enhanced Cyanobacterium sp. host cell involves protecting the recombinant nucleic acid sequence, for example a plasmid, against endogenous restriction endonucleases of the host cell by methylating at least a part of the recombinant nucleic acid sequence or modifying and/or eliminating the recognition sequences of the endogenous restriction endonucleases. By changing the nucleic acid sequence of potential recognition sites of restriction endonucleases, a digest of the recombinant nucleic acid sequence can be avoided. It was discovered that endogenous restriction endonucleases of ABICyano1 can cut an extrachromosomal plasmid carrying recombinant genes, thereby preventing a genetic transformation event of this host cell.

[0305] In an embodiment, methyltransferases, for example AvaI and AcyI, can be used to protect recombinant vector extrachromosomal plasmids. The plasmids can either be incubated with the methyltransferases in vitro or a helper plasmid can be present in a helper E. coli strain in order to methylate the extrachromosomal plasmids in vivo before conjugation takes place during the transformation of ABICyano1. In another embodiment, recognition sequences for the restriction enzymes can be modified or deleted. As described by Elhai and Wolk, in Conjugal Transfer of DNA to Cyanobacteria in Methods in Enzymology 02/1988; 167:747-54, herein incorporated by reference, plasmid pRL528 can be used as a helper plasmid for conjugal transfer. The indicated genes are M. AvaI coding for the methyltransferase protecting against the restriction endonuclease AvaI and the respective gene coding for M. AvaII. The latter is not required for transformation of ABICyano1, as it facts any endonuclease activity AvaII.

[0306] In an embodiment, the vector to be transformed into Cyanobacterium sp. host cells can be modified to integrate into the cyanobacterial chromosome by adding an appropriate DNA sequence homologous to the target region of the host genome. In another embodiment, the vector to be transformed can be modified to integrate into the cyanobacterial chromosome through in vivo transposition by introducing mosaic ends to the vector. Once the plasmid is established in the host cell, it can be present, for example, at a range of from 1 to many copies per cell.

[0307] In an embodiment, an endogenous plasmid derived from ABICyano1 can be modified, either in vivo or in vitro, to be a plasmid vector capable of introducing exogenous genes encoding enzymes for the production of a compound or compounds of interest into a wide range of host cyanobacterial cells such as ABICyano1, Cyanobacterium sp., or other cyanobacterial genera such as Synechocystis and Synechococcus.

[0308] The transfer of exogenous genes into Cyanobacteria often involves the construction of vectors having a backbone from a broad-host range bacterial plasmid, such as RSF1010. The RSF1010-based vector has been widely used as a conjugation vector for transforming bacteria, including cyanobacteria (Mermet-Bouvier et al. (1993) “Transfer and Replication of RSF1010-derived Plasmids in Several Cyanobacteria of the Genera Synechocystis and Synechococcus” Current Microbiology 27:323-3227), RSF1010 has an E. coli origin of replication, but does not have a cyanobacterial origin of replication.

[0309] As an example of additional tools used to transfer exogenous genes into cyanobacteria, several endogenous plasmids from Synechococcus sp. PCC 7002 were used as the backbone portions for plasmids to prepare vectors for heterologous gene expression, see Xu et al., Photosynthesis Research Protocols 684:273-293 (2011). Other vectors for transformation of cyanobacteria include the pDUI-based vectors. The pDU1 origin of replication is best suited for filamentous cyanobacteria. Attempts to transform ABICyano1, with either RSF1010 or pDU1-based shuttle vectors were unsuccessful using the techniques as described in the art.

[0310] In an embodiment, the ABICyano1 6.8 kb endogenous plasmid is used as a backbone for a plasmid vector used for transformation of Cyanobacterium sp. Since this is the endogenous vector from the species, it is likely to be more stable when transformed into the cell than plasmids derived from completely different organisms. In an embodiment, the entire p6.8 endogenous plasmid is inserted into a vector used for transformation. In another embodiment, a sequence of about 50%, 70%, 75%, 80% 85%, 90%, 95%, 98%, 99%, or 99.5% identity to the entire endogenous plasmid sequence is inserted into the extrachromosomal plasmid vector.

[0311] In an embodiment, a modified p6.8 vector is designed to have several modular units that can be swapped out using specific restriction enzymes. Promoters, genes of interest, selectable markers, and other desired sequences can be moved in and out of the vector as desired. This modular design makes genetic experiments faster and more efficient.

[0312] The modified p6.8 vector, according to certain embodiments of the disclosure, can replicate in both cyanobacteria and in E. coli. The vector contains a replication unit that can function in a broad range of cyanobacterial genera. The vector also contains a replicon for propagation in E. coli for ease of cloning and genetic manipulation using E. coli.

[0313] In an embodiment, a plasmid shuttle vector is provided which is characterized by being replicable in both E. coli and cyanobacterial species. The plasmid comprises a promoter capable of functioning in cyanobacteria and E. coli and a DNA sequence encoding a sequence capable of functioning as a selective Marker for both E. coli and cyanobacteria. In another embodiment, the shuttle vector includes two different promoter systems, one functioning in cyanobacteria and the other one functional in E. coli. In an embodiment, the plasmid shuttle vector contains at least 50% of the p6.8 plasmid. The plasmid shuttle vector enables the efficient transformation of cyanobacteria and the expression of recombinant genes of interest.

[0314] In another embodiment, the p6.8 derived plasmid vector also contains an origin of transfer (oriT) which is suitable for conjugation. In particular, the plasmid vector can contain a combined origin of replication and an origin of transfer (oriVT), which enables replication in Enterobacteriaceae, in particular E. coli, and which also enables conjugation with, for example, an E. coli donor strain and Cyanobacterium sp., in particular ABICyano1 as a recipient strain. Such an plasmid vector can be used for triparental mating wherein a conjugative plasmid present in one bacterial strain assists the transfer of a mobilizable plasmid, for example a plasmid vector disclosed herein, present in a second bacterial strain into a third recipient bacterial strain, which can be ABICyano1.

[0315] Also disclosed herein is a non-naturally occurring p6.8 derived vector in which a gene of interest, the recombinant gene, is operably linked to a shuttle vector. In an embodiment, cyanobacterial cells are transformed with the recombinant shuttle vector. The recombinant shuttle vector is relatively small in size, relatively stable in a cyanobacterial host cell, and can replicate in a variety of cyanobacterial species. This recombinant vector is useful for expressing a variety of heterologous genes in cyanobacteria.

[0316] In an embodiment for transforming host cells with p6.8 derived vectors, a shuttle vector expresses a codon-optimized antibiotic resistance gene (Ab^{R}), such as codon improved kanamycin or gentamycin resistance genes. In an embodiment, the shuttle vector is constructed based on a modular basis so that all of the key elements (replication ori, Ab^{R} gene and reporter gene) are exchangeable via unique restriction sites thus providing versatile cloning options and facilitating the delivery of genes of interest to target organisms. Other antibiotic resistance genes can be used if desired. For example, genes conferring resistance to ampicillin, chloramphenicol, spectinomycin or other antibiotics can be inserted into the vector, under the control of a suitable promoter. In some embodiments, the vector contains more than one antibiotic resistance gene.

[0317] In yet another embodiment, the p6.8 derived vector is modified by several factors so that it is capable of efficient replication in multiple types of cyanobacterial species. The vector has also been organized so that various sequences can be easily replaced with other desired sequences as needed. Thus a construct baying a different gene (or genes) of interest, a different antibiotic, a different promoter, etc. can be made with relative ease. The modified vector allows for rapid testing of various heterologous constructs in a cyanobacterial cell.

[0318] Any suitable promoter can be used to regulate the expression of the genes present in the vector. Exemplary promoter types include, for example, constitutive promoters, inducible promoters, endogenous promoters, heterologous promoters, and the like.

[0319] In an embodiment, the modular design of the p6.8 derived vector allows complex sequence manipulation in cyanobacteria.

[0320] In an embodiment, cyanobacteria disclosed herein can be transformed to add biochemical pathways to produce compounds of interest. Recombinant DNA sequences encoding genes can be amplified by PCR using specific primers. The amplified PCR fragments can then be digested with the appropriate restriction enzymes and cloned into either a self-replicating plasmid or into an integrative plasmid. An antibiotic resistance cassette for selection of positive clones can be present on the appropriate plasmid.

[0321] In an embodiment, the recombinant nucleic acids of interest can be amplified from nucleic acid samples using known amplification techniques. PCR can be used to amplify the sequences of the genes directly from mRNA, from cDNA, from genomic libraries or cDNA libraries. PCR and other in vitro amplification methods may also be useful, for example, to clone nucleic acid sequences that code for proteins to be expressed, to make nucleic acids to use as probes for detecting the presence of the desired mRNA in samples, and for nucleic acid sequencing.

[0322] In an embodiment, recombinant DNA vectors suitable for transformation of cyanobacteria can be prepared. For example, a DNA sequence encoding one or more of the genes described herein can be combined with transcriptional and other regulatory sequences which will direct the transcription of the sequence from the gene in the transformed cyanobacteria.

[0323] In an embodiment, recombinant genes of interest are inserted into the cyanobacterial chromosome. When the cell is polyploid, the gene insertions can be present in all of the copies of the chromosome, or in some of the copies of the chromosome.

[0324] In another embodiment, recombinant genes are present on an extrachromosomal plasmid. The extrachromosomal plasmid can be derived from an outside source such as RSF10-based plasmid vectors, for example, or can be derived from an endogenous plasmid from Cyanobacterium sp. host cells or from other cyanobacteria.

[0325] In an embodiment, recombinant genes are present on an extrachromosomal plasmid having multiple copies per cell. The plasmid can be present, for example, at about 1, 3, 5, 8, 10, 15, 20, 30, 40, 50, 60, 70, 80, 90, or more copies per cyanobacterial host cell. In an embodiment, the recombinant plasmids are fully segregated from the non-recombinant plasmids.

[0326] In another embodiment, recombinant genes are present on one cassette driven by one promoter. In another embodiment, the recombinant genes are present on separate plasmids, or on different cassettes.

[0327] In yet another embodiment, recombinant genes are modified for optimal expression by modifying the nucleic acid sequence to accommodate the cyanobacterial cell's protein translation system. Modifying the nucleic acid sequences in this manner can result in an increased expression of the genes.

[0328] Methods of genetic engineering of plasmids using E. coli are generally known in the art. In some embodiments disclosed herein, the plasmid construct preparation is performed in E. coli to allow for ease of genetic manipulation. In order to be propagated in E. coli, an origin of replication suitable for Enterobacteriaceae, in particular E. coli, is incorporated into the plasmid vector. Once the construct is prepared and changed in E. coli, the plasmid can then be transferred to the cyanobacterial cell, where it can replicate as an independent plasmid. Alternatively, the plasmid vector can also be synthesized via solid phase synthesis so that an origin of replication for Enterobacteriaceae does not need to be present in the plasmid vector.

[0329] Exemplary methods suitable for transformation of cyanobacteria include, as non-limiting examples, natural DNA uptake (Chung, et al. (1998) FEMS Microbiol. Lett. 164: 353-361; Frigaard, et al. (2004) Methods Mol. Biol. 274: 325-40; Zang, et al. (2007) J. Microbiol. 45: 241-245), conjugation, transduction, glass bead transformation (Kindle, et al. (1989) J. Cell Biol. 109: 2589-601; Feng, et al. (2009) Mol. Biol. Rep. 36: 1433-9; U.S. Pat. No. 5,661,017), silicon carbide whisker transformation (Dunahay, et al. (1997) Methods Mol. Biol. (1997) 62: 503-9), biolistics (Dawson, et al. (1997) Curr. Microbiol. 35: 356-62; Hohmann, et al. (1997) Proc. Natl. Acad. USA 94: 7469-7474; Jakobiak, et al. (2004) Protist 155:381-93; Tan, et al. (2005) J. Microbiol. 43: 361-365; Steinbrenner, et al. (2006) Appl Environ. Microbiol. 72: 7477-7484; Kroth (2007) Methods Mol. Biol. 390: 257-267; U.S. Pat. No. 5,661,017) electroporation (Kjaerulff, et al. (1994) Photosynth. Res. 41: 277-283; Iwai, et al. (2004) Plant Cell Physiol. 45: 171-5; Ravindran, et al. (2006) J. Microbiol. Methods 66: 174-6; Sun, et al. (2006) Gene 377: 140-149; Wang, et al. (2007) Appl. Microbiol. Biotechnol. 76: 651-657; Chaurasia, et al. (2008) J. Microbiol. Methods 73: 133-141; Ludwig, et al. (2008) Appl. Microbiol. Biotechnol. 78: 729-35), laser-mediated transformation, or incubation with DNA in the presence of or after pretreatment with any of poly(amidoamine) dendrimers (Pasupathy, et al. (2008) Biotechnol. J. 3: 1078-82), polyethylene glycol (Ohnuma, et al. (2008) Plant Cell Physiol. 49: 117-120), cationic lipids (Muradawa, et al. (2008) J. Biosci. Bioeng. 105: 77-80), dextran, calcium phosphate, or calcium chloride (Mendez-Alvarez, et al. (1994) J. Bacteriol. 176: 7395-7397), optionally after treatment of the cells with cell wall-degrading enzymes (Perrone, et al. (1998) Mol. Biol. Cell 9: 3351-3365). Biolistic methods (see, for example, Ramesh, et al. (2004) Methods Mol. Biol. 274: 355-307; Doestch, et al. (2001) Curr. Genet. 39: 49-60; all of which are incorporated herein by reference in their entireties.

### Extracellular Polymer Layer of ABICyano1

[0330] In an embodiment, a method of producing a genetically enhanced Cyanobacterium sp. host cell including non-naturally occurring ABICyano1 organisms, involves the steps of subjecting the host cell to compounds that increase the permeability of the extracellular polymer layer (also referred to as exopolysaccharide layer or EPS) and cell wall of the host cell and introducing an exogenous polynucleic acid into the host cell.

[0331] In an embodiment, in order to introduce the at least one recombinant gene into an ABICyano1 host cell, the permeability of the EPS is increased beforehand so that the recombinant nucleic acid sequence can pass through the EPS layer and reach the interior of the cyanobacterial cell.

[0332] In an embodiment, compounds that increase the permeability of the EPS and cell wall of the Cyanobacterium sp. host cell include N-acetylcysteine (NAC), lysozyme, β-galactosidase and combinations thereof. In an embodiment, a combination of NAC and lysozyme is used.

[0333] In an embodiment, the Cyanobacterium sp. host cell is first subjected to NAC followed by a treatment of lysozyme and then transformed. The inventors found out that such a pretreatment drastically increased the number of transformants in contrast to transformation attempts lacking pretreatment.

[0334] In one embodiment, the present invention includes cyanobacteria having an EPS layer, wherein the organism has been treated such that it has a 5-fold, 10-fold, 50-fold and about 100-fold increased rate of transformation as compared to the corresponding untreated cyanobacteria. In an embodiment, the ABICyano1 host cell can be subjected to NAC for 0.5 to 3 days. In another embodiment, the host cell is subjected to NAC for 1 to 2 days. In an embodiment, after subjecting the host cell to NAC, the host cell is further treated with lysozyme for 3 min. to 1 hour. In an embodiment, after subjecting the host cell to NAC, the host cell is further treated with lysozyme for 10 to 30 min. In an embodiment, after subjecting the host cell to NAC, the host cell is further treated with lysozyme for 10 to 15 min.

[0335] In an embodiment, NAC treatment is carried out at a temperature of 12 to 37° C. In an embodiment, NAC treatment is carried out at a temperature of 16° C. In an embodiment, lysozyme treatment is conducted in a temperature range from 20° C. to 37° C. In another embodiment, lysozyme treatment is conducted in a temperature range from 20° C. to 30° C.

[0336] In an embodiment, a method of producing a genetically enhanced Cyanobacterium sp. uses a concentration of NAC between 0.05 and 1 mg/mL and a concentration of lysozyme between 10 to 60 μg/mL to make Cyanobacterium sp. host cells competent to transformation.

[0337] In an embodiment, the techniques of pretreating the EPS of ABICyano1 are also used as a step in introducing recombinant nucleic acid sequences, such as plasmids, into other cyanobacterial cells with an EPS. Non-limiting examples of cyanobacteria with an EPS include several Nostoc and Anabaena strains such as Nostoc commune, Anabanena cylindrical, several Cyanothece sp. strains, such as Cyanothece PCC9224, Cyanothece CA 3, Cyanothece CE 4, Cyanothece ET 5, Cyanothece ET 2, and Cyanospira capsulate ATCC 43193. Further non-limiting examples of cyanobacteria with an EPS are Aphanocapsa, Anacystis, Chroococcus, Gloeothece, Microcystis, Synechocystis, Lyngbya, Microcoleus, Oscillatoria, Phormidium, Spirulina, Cyanospira, Scytonema, Tolypothrix, Chlorogloeopsi, Fischerella, Mastigocladus (see for example: “Exopolysaccharide-producing cyanobacteria and their possible exploitation: A review” Roberto De Philippis et al., Journal of Applied Phycology 13: 293-299, 2001, and “Exocellular polysaccharides from cyanobacteria and their possible applications” Roberto De Philippis et al., FEMS Microbiology Reviews 22 (1998) 151-175.

### Transformation of ABICyano1 by Conjugation

[0338] Attempts at transformation of ABICyano1 by conjugation using methods well known in the an usually resulted in failure. Successful conjugation routinely occurred only after treating the EPS of ABICyano1 according to the methods disclosed herein and then using conjugation techniques well known in the art. In an embodiment, transformation of ABICyano1 with exogenous polynucleotides is performed after treatment of the EPS of ABICyano1 by the conjugation technique as described in Elhai and Wolk, 1988 by using a helper plasmid pRL528.

[0339] In certain embodiments, generated plasmids containing oriVT are used for conjugation. The shuttle vectors are transformed into ABICyano1 following a modified conjugation protocol which includes the pretreatment of ABICyano1 to reduce its EPS layer as described herein.

[0340] In an embodiment, successful transformation of an exogenous polynucleotide into ABICyano1 occurs using triparental mating with E. coli strain J53 bearing a conjugative RP4 plasmid, E. coli strain HB101 containing the exogenous cargo to be introduced into ABICyano1 and the pRL528 helper plasmid.

### Transformation of ABICyano1 by Electroporation

[0341] In an embodiment, electroporation is used for successful transformation of ABICyano1 using, for example, the same plasmids as for conjugation, but with lower efficiency.

[0342] As with the conjugation transformation protocol disclosed herein, strain-specific adaptations of standard electroporation protocols may be made to avoid DNA digestion by endogenous restriction enzymes and to allow DNA entry through the EPS layer of ABICyano1 host cells. To achieve successful electroporation, DNA may be protected against endogenous restriction enzymes by methylation. Prior to electroporation using techniques well blown in the art, ABICyano1 cells may be pretreated with positively charged polyaminoacids such as poly-L-lysine hydrobromide or poly-L-ornithine hydrochloride or combinations thereof (in particular poly-L-lysine hydrobromide) in order to increase the DNA uptake efficiency.

### Selecting for Successful Transformation of ABICyano1

[0343] In an embodiment, the presence of a foreign gene encoding antibiotic resistance in a cell is selected by placing putatively transformed cells into a media containing an amount of the corresponding antibiotic and selecting cells that survive. The selected cells are then grown in the appropriate culture medium to allow for further testing.

[0344] In another embodiment, colony PCR methods are used to confirm transformants. In certain embodiments of this procedure, three primer sets are used and are directed against parts of the pABICyano1-6.8 shuttle vectors to detect specific fragments of the shuttle vector. Transformants exhibiting the predicted PCR products are analyzed further by plasmid rescue. In one embodiment for plasmid rescue, a 25 mL liquid culture is subjected to DNA isolation.

[0345] In a non-limiting example of plasmid rescue, 500 ng to 1 μg of isolated DNA from ABICyano1 transformants containing the transformed plasmids is re-transformed into E. coli and usually results in approximately 10-20 transformants per transformation implemented. Plasmid DNA of ten E. coli colonies is isolated and analyzed by PCR using specific primers for the transformed plasmids. The plasmid DNA is further analyzed with specific restriction enzymes and then sequenced.

Transformation of p6.8 Kb into Other Cyanobacterial Species

[0346] In another embodiment, the modified plasmid vector based on the endogenous 6.8 kb plasmid backbone from ABICyano1, in addition to being useful for transformation to other Cyanobacterium sp. host cells, is used to transform other cyanobacterial genera. As an example, a shuttle vector containing the 6.8 kb endogenous plasmid from ABICyano1 with a kanamycin resistance cassette (Km^{R}) and the oriVT for replication in E. coli is transformed into Synechococcus PCC 7002 by natural uptake.

[0347] In another embodiment, a modified vector based on the endogenous 6.8 kb plasmid from ABICyano1 is transformed into other genera of cyanobacteria. Examples of cyanobacteria that can be transformed with p6.8 derived vectors disclosed herein include, but are not limited to Synechocystis, Synechococcus, Acaryochloris, Anabaena, Thermasynechococcus, Chamaesiphon, Chroococcus, Cyanobium, Dactylococcopsis, Gloeobacter, Gloeocapsa, Gloeothece, Microcystic, Prochlorococcus, Prochloron, Chroococcidiopsis, Cyanocystis, Dermocarpella, Myxosarcina, Pleurocapso, Stanieria, Xenococcus, Arthrospira, Borzia, Crinailium, Geitlerinema, Halospirulina, Leptolyngbya, Limnothrix, Lyngbya, Microcoleus, Cyanodictyon, Aphanocapsa, Oscillatoria, Planktothrix, Prochlorothrix, Pseudanabaeno, Spirulina, Starria, Symploca, Trichodesmium, Tychonema, Anabaenopsis, Aphanizomenon, Calothrix, Cyanospira, Cylindrospermopsis, Cylindrospermum, Nodularia, Nostoc, Chlorogloeopsis, Fischerella, Geitleria, Nostochopsis, Iyengariella, Stigonema, Rivularia, Scytonema, Tolypothrix, Cyanothece, Phormidium, Adrianema, and the like.

### Promoters

[0348] In an embodiment, any desired promoter can be used to regulate the expression of the genes for the production of a desired compound in ABICyano1. Exemplary promoter types include but are not limited to, for example, constitutive promoters, inducible promoters (e.g., by nutrient starvation, heat shock, mechanical stress, environmental stress, metal concentration, light exposure, etc.), endogenous promoters, heterologous promoters, and the like.

[0349] In an embodiment, recombinant genes are placed under the transcriptional control (operably linked) of one or more promoters selected from P_{rbcLS}, P_{utcA}, P_{nblA}, P_{isiA}, P_{petJ}, P_{petE}, P_{corT}, P_{smtA}, P_{zinA}, P_{sigB}, P_{lrtA}, P_{htpG}, P_{hspA}, P_{clpB1}, P_{hliB}, P_{ggpS}, P_{psbA2}, P_{psaA}, P_{nirA}, P_{narB}, P_{nrtA}, P_{isiB}, P_{nrsB}, P_{lrtA}, P_{mrgA}, P_{pstS} and P_{erhC}. In an embodiment, synthetic promoters are used.

[0350] Recombinant genes disclosed herein may be regulated by one promoter, or they can each be regulated by individual promoters. The promoters can be constitutive or inducible. The promoter sequences can be derived, for example, from the host cell, from another organism, or can be synthetically derived.

[0351] Exemplary promoters for expression in cyanobacteria include, but are not limited to, P_{petJ}, P_{psbD}, P_{nblA}, P_{rpoA}, P_{isiB}, P_{rbcLS}, P_{nicA}, P_{nblA}, P_{isiA}, P_{petJ}, P_{petE}, P_{corT}, P_{smtA}, P_{ziaA}, P_{sigB}, P_{lrtA}, P_{htpG}, P_{hspA}, P_{clpB1}, P_{hliB}, P_{ggpS}, P_{psbA2}, P_{psaA}, P_{nirA}, P_{narB}, P_{nrtA}, P_{erhC}, and additional metal ion inducible promoters and the like. Examples of constitutive promoters that can be used include, but are not limited to, P_{rbcL}, P_{rnpA}, P_{rpsL}, P_{rpoA}, P_{psaA}, P_{psbA2}, P_{psbD}, P_{cpcB}.

[0352] The promoters hspA, clpB1, and hliB can be induced by heat shock (raising the growth temperature of the host cell culture from 30° C. to 40° C.), cold shock (reducing the growth temperature of the cell culture from 30° C. to 20° C.), oxidative stress (for example by adding oxidants such as hydrogen peroxide to the culture), or osmotic stress (for example by increasing the salinity). The promoter sigB can be induced by stationary growth, heat shock, and osmotic stress. The promoters ntcA and nblA can be induced by decreasing the concentration of nitrogen in the growth medium and the promoters psaA and psbA2 can be induced by low light or high light conditions. The promoter htpG can be induced by osmotic stress and heat shock. The promoter crhC can be induced by cold shock. An increase in copper concentration can be used in order to induce the promoter petE, whereas the promoter petJ is induced by decreasing the copper concentration. Additional details of these promoters can be found, for example, in the patent application PCT/EP2009/060526, which is herein incorporated by reference in its entirety.

[0353] In an embodiment, truncated or partially truncated versions of promoters disclosed herein can be used including only a small portion of the native promoters upstream of the transcription start point, such as the region ranging from −35 to the transcription start. Furthermore, introducing nucleotide changes into the promoter sequence, e.g. into the TATA box, the operator sequence and/or the ribosomal binding site (RBS) can be used to tailor or improve the promoter strength and/or its induction conditions, e.g. the concentration of inductor required for induction. For example, the inducible promoter can be P_{nirA}, and can be P_{nirA} from ABICyano1, which is repressed by ammonium and induced by nitrite. This promoter may contain nucleotide changes in either one of the ribosomal binding site, the TATA box, the operator, and the 5′-UTR (untranslated region).

[0354] In certain embodiments, the present invention includes a polynucleotide comprising or consisting of any of the promoter sequences described herein, or variants thereof, including those having at least 80%, at least 90%, at least 95%, at least 98%, or at least 99% identity to the reference promoter sequence.

[0355] In one embodiment, P_{nirA} (SEQ ID NO: 112) can have the following generalized nucleotide sequence:

5′(N)₁₁₆ATGCAAAAAACGAAT(N)₇ATGTGTAAAAAGAAA(N)₁₅GTAGTCA
AAGITAC(N)₂₂TAATGT(N)₅₅CCGAGGACAAA(N)₂ATG-3′

Each of the nucleotides N is independently selected from a group consisting of A, T, C and G, and the two ATGs in the 5′-region of the promoter are the start for NtcB binding sites and the capital letter GTA is the start for the NtcA binding site, and the bold letters CCG denotes the start of the RBS, and the 3′-ATG is the start codon for the first recombinant gene transcriptionally controlled by this promoter.

[0356] Another generalized DNA sequence of promoter nirA (SEQ ID NO: 113) includes nucleotide changes in the ribosomal binding site leading to the following general DNA sequence:

5′(N)₁₁₆ATGCAAAAAACGAAT(N)₇ATGTGTAAAAAGAAA(N)₁₅GTAGTCA
AAGTTAC(N)₂₂TAATGT(N)₅₅GGAGGATCAGCC(N)₂ATG-3′

The bold and underlined nucleotides denote nucleotide changes in comparison the native promoter.

[0357] In another embodiment, modified promoter nirA (SEQ ID NO: 114) can include changes in the operator region (binding site for NtcB and NtcA) and the TATA box leading to the following general nucleotide sequence:

5′(N)₁₁₆ATGCAAAAAACGCAT(N)₇ATGCGTAAAAAGCAT(N)₁₅GTA
ATCAAAGTTAC(N)₂₂TAATAT(N)₅₅CCGAGGACAAA(N)₂ATG-3′

The bold and underlined nucleotides denote nucleotide changes in comparison to the native promoter.

[0358] Another variant of P_{nirA} (SEQ ID NO: 115) combines the above changes and has the following DNA sequence:

5′(N)₁₁₆ATGCAAAAAACGCAT(N)₇ATGCGTAAAAAGCAT(N)₁₅GTA
ATCAAAGTTAC(N)₂₂TAATAT(N)₅₅GGAGGATCAGCC(N)₂ATG-3′

[0359] Another embodiment of the disclosure provides the Co²⁺ inducible promoter corT (SEQ ID NO: 116), which has the general nucleotide sequence of:

5′CAT(N)₇GTTTACTCAAAACCTTGACATTGACACTATGTTGGTTTA
GGCT(N)₁₅CAAGTTAAAAAGCATG-3′,

Each of the nucleotides N is independently selected from a group consisting of: A, T, C and G, and the 5′-CAT is the start codon of corR (antisense orientation), the 3′ATG is the start codon for the first recombinant gene transcriptionally controlled by this promoter.

[0360] A modified variant of (SEQ ID NO: 117) includes changes in the RBS having the following nucleotide sequence:

5′CAT(N)₇GTTTACTCAAAACCTTGACATTGACACTAATGTTAAGGTTTA
GGCT(N)₁₅GAGGATAAAAAGCATG-3′,

The bold and underlined nucleotides denote nucleotide changes in comparison to the native promoter.

[0361] In an embodiment, another variant of P_{corT} (SEQ ID NO: 118) includes changes in the TATA box having the general DNA sequence of:

5′CAT(N)₇GTTTACTCAACCTTGACATTGACACTAATGTTAGGTTTA
GAAT(N)₁₅CAAGTTAAAAAGCATG-3′,

The bold and underlined nucleotides denote nucleotide changes in comparison to the native promoter.

[0362] In another embodiment, a modified corT promoter (SEQ ID NO: 119) combines the above mentioned two modifications to the RBS and the TATA box, and has the following DNA sequence:

5′CAT(N)₇GTTTACTCAAACCTTGACATTGACACTTGTTAAGGTTTA
GAAT(N)₁₅GAGGATAAAAAGCATG-3′

[0363] In yet another embodiment, the Zn²⁺ inducible promoter smtA (SEQ ID NO: 120) from Synechococcus sp. PCC 7002 can be used having the following general nucleotide sequence:

5′(N)₈AATACCTGAATAATTGtTCATGTGtT(N)₄TAAAAATGTGAACAAT
CGTTCAACTATTTA(N)₁₂GGAGGT(N)₇ATG-3′

[0364] In an embodiment, changes in the ribosomal binding site can lead to the following generalized nucleotide sequences of P_{smtA} SEQ ID NO: 121 and SEQ ID NO: 122, respectively:

5′(N)₈AATACCTGAATAATTGTTCATGTGTT(N)₄TAAAAATGTGAACAAT
CGTTCAACTATTTA(N)₁₀AAGGAGGTGAT(N)₄ATG-3′, or
5′(N)₈AATACCTGAATAATTGTTCATGTGTT(N)₄TAAAAATGTGAACAAT
CGTTCAACTATTTA(N)₁₀AAGGAGGTAT(N)₅ATG-3′

The bold and underlined nucleotides denote nucleotide changes in comparison to the native promoter.

[0365] In an embodiment, disclosed herein are recombinant genes of a shuttle vector that comprise or are operably linked to an inducible promoter and/or a constitutive promoter. The promoter can be upstream of one gene to regulate that gene, or the promoter can be upstream of several genes so that one promoter regulates the expression of more than one gene. Alternatively, in some embodiments, each recombinant gene can be regulated by a separate promoter. In an embodiment, the promoter can be derived from a cyanobacterial host cell, can be derived from another cyanobacterial species, or can be derived from another organism.

[0366] In an embodiment, a promoter controlling the transcription of at least one recombinant gene is a cyanobacterial promoter. In an embodiment, cyanobacterial promoters include, but are not limited to, promoter psbA2 from Synechocystis sp. PCC 6803, promoter cpcBA from Synechocystis PCC 6803, P_{rpsL} and P_{nblA7120} from Nostoc sp. PCC 7120, Pr_{bcL6803} from Synechocystis sp. PCC 680 and the P_{smtA1535} promoter from Synechococcus sp. PCC 7002.

[0367] In another embodiment, a promoter used herein is a heterologous promoter from a different cyanobacterial or bacterial species. For example, the transcriptional regulator gene and promoter combinations of ziaR-P_{ziaA} from Synechocystis sp. PCC6803, smtB-P_{smtA} from Synechococcus sp. PCC 7002, corR-P_{corT} from Synechocystis sp. PCC6803, nrsRS-P_{nrsB} from Synechocystis sp. PCC 6803, and aztR-P_{aztA} from Anabaena (Nostoc) sp. strain PCC 7120 can be used to control the transcription of the at least one recombinant gene in Cyanobacterium sp. such as ABICyano1, for example.

[0368] Examples of inducible promoters disclosed herein include, but are not limited to promoter/regulator pair aztR-P_{aztA}, which can be activated by adding Zn²⁺; Synechococcus PCC 7002 smtB-P_{smtA} which is induced by Zn²⁺ and corR-P_{corT} by adding Co²⁺; the regulator/promoter combination nrsRS-P_{nrsB} which is induced by the addition of Ni; and the combination of ziaR-P_{ziaA} with the ziaA promoter and the ziaR repressor which can be induced by the addition of Zn²⁺.

[0369] In another embodiment, the promoter smtA, which is endogenous to Synechococcus PCC 7942 and Synechococcus PCC 7002, is used to control the expression of genes encoded on vectors disclosed herein. The gene smtA (SYNPCC7002_A2563), which is transcriptionally controlled by promoter smtA, codes for a metallothionein (YP_{—}001735795.1) involved in resistance to, inter cilia, zinc. A repressor protein (YR_{—}001735796.1) binds to P_{smtA} in the uninduced state and is encoded by the gene smtB (SYNPCC7002_A2564).

[0370] In an embodiment promoter aztA from Anabaena PCC 7120 is used to control expression of genes of interest on vectors disclosed herein. In Anabaena PCC 7120, the gene aztA (alr7622) codes for a Zn²⁺, Cd²⁺ and Pb²⁺ transporting ATPase (NP_{—}478269.1) which is transcriptionally controlled by promoter aztA. Promoter aztA is blocked in the uninduced state by a repressor protein (NP_{—}478268.1) encoded by the gene aztR (all7621).

[0371] In an embodiment, promoter corT from Synechocystis sp. PCC 6803 is used to control expression of genes of interest on vectors disclosed herein. In Synechocystis sp. PCC 6803, the gene corT (slr0797) encodes a cobalt transporting ATPase (NP_{—}442633.1). This gene is transcriptionally controlled by promoter corT which is transcriptionally controlled by a regulator protein (NP 442632.1) coded by the gene corR (sll0794) which binds to the corT promoter. The promoter corT is one example of a cobalt inducible promoter, whereas promoters ziaA, smtA, and smtB are examples of zinc inducible promoters.

[0372] In an embodiment, the tightness and the level of expression of the protein involved in a biosynthetic pathway for the production of a compound or marker protein can be improved through mutations introduced in the TATA-box, the operator sequence and/or the ribosomal binding site of the promoter controlling the recombinant gene. The sequence of the mutated promoter can have at least 90%, at least 95%, at least 98%, or at least 99% sequence identity to an endogenous promoter of ABICyano1 or to another cyanobacterial promoter.

[0373] In an embodiment, a promoter disclosed herein can be an inducible promoter selected from the group consisting of P_{nirA}, P_{nrtA}, and P_{narB} from ABICyano1, for example. In another embodiment, a promoter is a constitutive promoter selected from the group consisting of P_{rpsL}, P_{rbc}, P_{cpcB} and P_{petE} which can all be endogenous promoters of ABICyano1, for example.

[0374] In an embodiment, more than one recombinant gene is used in a recombinant vector, hi one embodiment, a first and second recombinant gene can be controlled by one promoter, thereby forming a transcriptional operon. In another embodiment, the first and second recombinant genes are controlled by different first and second promoters. In the case that the first recombinant gene codes for a protein catalyzing a reaction not present in the wild-type Cyanobacterium sp. that directs the carbon flux away from the metabolic pathways of the wild-type Cyanobacterium sp., such as pyruvate decarboxylase, in particular embodiments this gene is controlled by an inducible promoter such as P_{nirA} from ABICyano1. Such a configuration ensures that the gene is only turned on upon induction.

[0375] In an embodiment, the recombinant gene under control of the promoter is induced if a sufficiently high culture density of Cyanobacterium sp. is reached. In the case that the second recombinant gene codes for a protein catalyzing a chemical reaction present in the wild-type Cyanobacterium sp., such as alcohol dehydrogenase the gene can be under the control of either an inducible or a constitutive promoter because it does not disturb the carbon flux to the same extent as the non-native protein encoded by the first recombinant gene. The second recombinant gene then may be under the control of constitutive promoters such as Pr_{bcL}, P_{petE}, or P_{rpsL}, all from ABICyano1, for example.

[0376] In an embodiment, a transcription terminator is present between the first and second recombinant gene in order to ensure a separate transcriptional control of the first and second recombinant gene and to provide for a high production of a compound of interest, such as ethanol. In certain embodiments, the present invention includes ethanologenic cassettes. In an embodiment for an ethanologenic cassette used to produce ethanol as a compound of interest, a first recombinant gene encodes pyruvate decarboxylase and the second recombinant gene encodes alcohol dehydrogenase. The first recombinant gene (pdc) is under the transcriptional control of a first inducible promoter and the second recombinant gene (adh) is under the transcriptional control of a second constitutive promoter. The first inducible promoter can be selected from, for example, PnirA, PnirA variants PnirA*2, PnirA*3, PnirA*4, PmntC, PsmtA (Porf3126), Porf221, Porf222, Porf223, Porf316, Porf3232, and Porf3461 and the second constitutive promoter can be selected from, for example, PrpsL, PipsL*4, Prbc*(optRBS), and PcpcB. The promoter rpsL (SEQ ID NO: 123) controls the transcription of the 30 S ribosomal protein S12 in ABICyano1 and has the following sequence:

5′-

[chemical structure]

AGATTGTCACTGGTATTTTATACTAGAGGCAAATTATATTTATATATACA

[chemical structure]

[0377] The 3′-ATG is the start codon of the gene controlled by the rpsL promoter, the boxed sequence TAAAAA is the ribosomal binding site and the other boxed sequences are the regions for the binding of the regulator and the TATA box.

[0378] The following modified promoter sequence PrpsL*4 (SEQ ID NO: 124) contains modifications in the regulator binding sites and the ribosomal binding site as indicated by the bold-faced underlined nucleotides: 5′-

[chemical structure]

AGATTGTCACTGGTATTTTATACTAGAGGCAAATTATATTTATATATACA

[chemical structure]

[0379] In an embodiment, a non-naturally occurring ABICyano1 host cell comprising any of the ethanologenic cassettes described herein produces ethanol in quantities of at least 0.012% (v/v) per day, at least 0.025% (V/v) per day, preferably at least 0.03% (V/v) per day, most preferred at least 0.04 (v/v) per day. In certain other embodiments, the transcription of both the first and second recombinant gene encoding the pyruvate decarboxylase enzyme and the recombinant gene encoding the alcohol dehydrogenase enzymes are controlled by the same single promoter. For these embodiments, an inducible promoter may be used. In such a case, the second recombinant gene encoding the alcohol dehydrogenase may be arranged upstream of the first recombinant gene encoding the pyruvate decarboxylase enzyme, so that transcription of the alcohol dehydrogenase gene occurs before transcription of the pyruvate decarboxylase gene. In this way, a delay in ADH enzyme expression relative to PDC enzyme expression can be avoided and a sufficiently high ADH enzyme expression level of ADH can be accomplished, so that transient acetaldehyde accumulation is effectively reduced.

[0380] In an embodiment, a transcription terminator is present between the first and second recombinant gene in order to ensure a separate transcriptional control of the first and second recombinant gene and to provide for a high production of a compound of interest, such as ethanol. In an embodiment for an ethanologenic cassette used to produce ethanol as a compound of interest, a first recombinant gene encodes pyruvate decarboxylase and the second recombinant gene encodes alcohol dehydrogenase. In particular embodiments, the first recombinant gene (pdc) is under the transcriptional control of a first inducible promoter and the second recombinant gene (adh) is under the transcriptional control of a second constitutive promoter.

[0381] Promoter elements disclosed herein may be operably linked with ally genes encoding any enzymes useful for the production of compounds of interest by using standard molecular cloning techniques.

Endogenous Promoters from ABICyano1

[0382] In an embodiment, promoters used herein can be endogenous to ABICyano1. In another embodiment endogenous promoters from ABICyano1 can be modified in order to increase or decrease efficiency and/or promoter strength. In an embodiment, endogenous promoters used to control the expression of genes on vectors disclosed herein include, but are not limited to promoter cpcB from ABICyano1 (SEQ ID NO: 9), promoter nirA (SEQ ID NO: 10) from ABICyano1, promoter IrtA (SEQ ID NO: 11) (light-repressed protein, ribosomal subunit interface protein) from ABICyano1, promoter mrgA (SEQ ID NO: 12) (214 bp) from ABICyano1, promoter nblA (SEQ ID NO: 13) (338 bp) from ABICyano1, promoter ggpS (glucosylglycerol-phosphate synthase) (SEQ ID NO: 14) (408 bp) from ABICyano1, promoter petJ (SEQ ID NO: 15) (411 bp) from ABICyano1, promoter ppsA (phosphoenolpyruvate synthase gene) (SEQ ID NO: 16) (211 bp) from ABICyano1, promoter rnpA (Ribonuclease P) (SEQ ID NO: 17) (542 bp) from ABICyano1, promoter pstS (SEQ ID NO: 18) (380 bp) from ABICyano1.

[0383] RNA-Seq experiments were conducted on ABICyano1 in order to identify potential metal-ion inducible promoters in ABICyano1. In an embodiment, the upstream regions of metal ion responding/inducible genes in ABICyano1, listed in table 2 below, were selected to drive/control expression of an ethanologenic gene cassette in ABICyano1. The nucleic acid sequences of the promoters are provided for in the sequence listing corresponding to SEQ ID NOs 19-41. All of the potential inducible promoters may be used for the transcriptional control of at least one recombinant gene.

TABLE 2

| | Promoter | | Induc- |
|---|---|---|---|
| Gene_id | Sequence | Homology | ible by |
| ABICyano1_orf0128 | SEQ ID | hypothetical protein | nickel |
| | NO: 19 | | |
| ABICyano1_orf1486 | SEQ ID | putative nickel- | nickel |
| | NO: 20 | containing super- | |
| | | oxide dismutase | |
| ABICyano1_orf3164 | SEQ ID | ferrochelatase | nickel |
| | NO: 21 | | |
| ABICyano1_orf3293 | SEQ ID | hypothetical protein | nickel |
| | NO: 22 | L8106_16134 | |
| ABICyano1_orf3621 | SEQ ID | hypothetical protein | nickel |
| | NO: 23 | Cyan7822_1798 | |
| ABICyano1_orf3635 | SEQ ID | carbohydrate- | nickel |
| | NO: 24 | selective porin | |
| ABICyano1_orf3858 | SEQ ID | manganese/iron | nickel |
| | NO: 25 | superoxide | |
| | | dismutase-like | |
| | | protein | |
| ABICyano1_orf1071 | SEQ ID | Mn transporter | zinc |
| | NO: 26 | | |
| ABICyano1_orf1072 | SEQ ID | ABC transporter | zinc |
| | NO: 27 | family protein | |
| ABICyano1_orf1074 | SEQ ID | ABC 3 transport | zinc |
| | NO: 28 | family | |
| ABICyano1_orf1075 | SEQ ID | No hits found -\|- | zinc |
| | NO: 29 | KEGG: -\|- | |
| | | CyanoBase | |
| ABICyano1_orf1542 | SEQ ID | hypothetical protein | zinc |
| | NO: 30 | PCC8801_4423 | |
| ABICyano1_orf1823 | SEQ ID | RNA polymerase | zinc |
| | NO: 31 | sigma factor | |
| ABICyano1_orf1824 | SEQ ID | No hits found -\|- | zinc |
| | NO: 32 | KEGG: -\|- | |
| | | CyanoBase | |
| ABICyano1_orf3126 | SEQ ID | Metallothionein | zinc |
| | NO: 33 | | |
| ABICyano1_orf3389 | SEQ ID | HtrA2 peptidase | zinc |
| | NO: 34 | | |
| ABICyano1_orf0221 | SEQ ID | CopA family copper- | copper |
| | NO: 35 | resistance protein | |
| ABICyano1_orf0222 | SEQ ID | copper resistance | copper |
| | NO: 36 | B | |
| ABICyano1_orf0223 | SEQ ID | No hits found -\|- | copper |
| | NO: 37 | KEGG: -\|- | |
| | | CyanoBase | |
| ABICyano1_orf0316 | SEQ ID | hypothetical protein | copper |
| | NO: 38 | CY0110_11047 | |
| ABICyano1_orf3232 | SEQ ID | cation-transporting | copper |
| | NO: 39 | ATPase | |
| ABICyano1_orf3461 | SEQ ID | petJ | copper |
| | NO: 40 | | |
| ABICyano1_orf3749 | SEQ ID | conserved | cobalt |
| | NO: 41 | hypothetical protein | |

### Codon Improvement of Recombinant Genes

[0384] At least some of the nucleic acid sequences to be expressed in cyanobacterial host cells can be codon improved for optimal expression in the target cyanobacterial strain. The underlying rationale is that the codon usage frequency of highly expressed genes is generally correlated to the host cognate tRNA abundance. (Bulmer, Nature 325:728-730; 1987). Codon improvement (sometimes referred to as codon optimization or codon adaptation) can be performed to increase the expression level of foreign genes such as antibiotic resistance genes, ethanologenic (or other compounds of interest) cassettes, and any other expressed genes on a plasmid, for example.

[0385] Codon improvement of heterologously derived genes (such as genes encoding antibiotic resistance genes, and the recombinant production genes, such as genes in an ethanologenic cassette) was conducted using the software Gene Designer (DNA 2.0, Menlo Park, Calif.), and was guided by the ABICyano1 codon usage table derived from ribosomal proteins and highly expressed genes (such as photosynthesis genes). To improve heterologous gene expression, original sequences of interest (such as Z. mobilis pdc and Synechocystis PCC 6803 adh) were assessed with the online software OPTIMIZER (Puigbò P. Guzmán E, Romeu A, & Garcia-Vallvé S (2007) OPTIMIZER: a web server for optimizing the codon usage of DNA sequences Nucleic Acids Research 35(suppl 2):W126-W131) based on the codon-usage table derived from ABICyano1 genome. The pre-optimized sequences were further modified with Gene Designer 2.0 (available at dna20.com/genedesigner2/) to ensure that their codon adaptation index (Sharp PM & Li W- H (1987).

[0386] The codon adaptation index is a measure of directional synonymous codon usage bias, and its potential applications, (see Nucleic Acids Research 15(3):1281-1295). The effective number of codons (see, Wright F (1990) Gene 87(1):23-29) are designed match those of highly expressed genes (such as ribosomal proteins) in the ABICyano1 genome. The resulting polynucleotides using improved codons were further modified and optimized to avoid the presence of any known or predicted putative ABICyano1 endonuclease restriction sites (AvaI, BsaHI, KasI, XhoI etc.); internal Shine-Dalgarno sequence and RNA destabilizing sequences; an internal terminator sequence; and a repeat sequence of greater than about 10 bp (see, Welch et at, PLOS One 4, e7002; 2009; and Welch et al., journal of the Royal Society; Interface 6 (Suppl 4), 5467S476; 2009).

[0387] In an embodiment, the nucleic acid sequences of the recombinant genes are modified so that they will have improved expression in cyanobacteria. For example, the selectable marker gene that confers gentamycin or kanamycin resistance was codon optimized for higher expression in cyanobacteria. Additionally, the selectable marker gene that confers kanamycin resistance was codon optimized for higher expression in cyanobacteria. In an embodiment, as a result of codon improvement, the GC % of the antibiotic resistance genes decreased from 40-53% to 33-40%, which is similar to that of ABICyano1 coding genes (about 36% on average). The codon adaptation index of the codon improved antibiotic resistance genes is significantly improved from less than 0.4 to greater than 0.8, which is similar to that of ABICyano1 endogenous genes.

[0388] Table 3 depicts the codon usage statistics within ABICyano1.

TABLE 3

| Amino | | | | Frequency |
|---|---|---|---|---|
| Acid | Codon | Fraction | Number | (/1000) |
| Ala | GCA | 0.293 | 20724 | 18.356 |
| Ala | GCC | 0.214 | 15144 | 13.414 |
| Ala | GCG | 0.14 | 9870 | 8.742 |
| Ala | GCT | 0.353 | 24915 | 22.068 |
| Arg | AGA | 0.347 | 16040 | 14.207 |
| Arg | AGG | 0.09 | 4158 | 3.683 |
| Arg | CGA | 0.106 | 4886 | 4.328 |
| Arg | CGC | 0.131 | 6043 | 5.353 |
| Arg | CGG | 0.039 | 1813 | 1.606 |
| Arg | CGT | 0.288 | 13329 | 11.806 |
| Asn | AAC | 0.22 | 14609 | 12.94 |
| Asn | AAT | 0.78 | 51712 | 45.804 |
| Asp | GAC | 0.193 | 11063 | 9.799 |
| Asp | GAT | 0.807 | 46399 | 41.098 |
| Cys | TGC | 0.218 | 2501 | 2.215 |
| Cys | TGT | 0.782 | 8976 | 7.95 |
| Gln | CAA | 0.806 | 43747 | 38.749 |
| Gln | CAG | 0.194 | 10554 | 9.348 |
| Glu | GAA | 0.787 | 60690 | 53.756 |
| Glu | GAG | 0.213 | 16451 | 14.571 |
| Gly | GGA | 0.324 | 22709 | 20.114 |
| Gly | GGC | 0.125 | 8720 | 7.724 |
| Gly | GGG | 0.151 | 10542 | 9.338 |
| Gly | GGT | 0.401 | 28065 | 24.859 |
| His | CAC | 0.251 | 4859 | 4.304 |
| His | CAT | 0.749 | 14516 | 12.858 |
| Ile | ATA | 0.195 | 18334 | 16.239 |
| Ile | ATC | 0.19 | 17872 | 15.83 |
| Ile | ATT | 0.616 | 57964 | 51.342 |
| Leu | CTA | 0.088 | 10776 | 9.545 |
| Leu | CTC | 0.058 | 7129 | 6.314 |
| Leu | CTG | 0.033 | 4040 | 3.578 |
| Leu | CTT | 0.116 | 14162 | 12.544 |
| Leu | TTA | 0.571 | 69559 | 61.612 |
| Leu | TTG | 0.133 | 16235 | 14.38 |
| Lys | AAA | 0.836 | 59396 | 52.61 |
| Lys | AAG | 0.164 | 11694 | 10.358 |
| Met | ATG | 1 | 20093 | 17.797 |
| Phe | TTC | 0.172 | 8420 | 7.458 |
| Phe | TTT | 0.828 | 40450 | 35.829 |
| Pro | CCA | 0.169 | 7746 | 6.861 |
| Pro | CCC | 0.275 | 12613 | 11.172 |
| Pro | CCG | 0.066 | 3012 | 2.668 |
| Pro | CCT | 0.491 | 22560 | 19.982 |
| Ser | AGC | 0.088 | 6435 | 5.7 |
| Ser | AGT | 0.306 | 22393 | 19.835 |
| Ser | TCA | 0.14 | 10217 | 9.05 |
| Ser | TCC | 0.102 | 7465 | 6.612 |
| Ser | TCG | 0.044 | 3196 | 2.831 |
| Ser | TCT | 0.321 | 23473 | 20.791 |
| Thr | ACA | 0.26 | 15649 | 13.861 |
| Thr | ACC | 0.236 | 14251 | 12.623 |
| Thr | ACG | 0.083 | 5024 | 4.45 |
| Thr | ACT | 0.42 | 25340 | 22.445 |
| Trp | TGG | 1 | 14964 | 13.254 |
| Tyr | TAC | 0.187 | 7364 | 6.523 |
| Tyr | TAT | 0.813 | 31912 | 28.266 |
| Val | GTA | 0.28 | 18541 | 16.423 |
| Val | GTC | 0.117 | 7778 | 6.889 |
| Val | GTG | 0.184 | 12184 | 10.792 |
| Val | GTT | 0.419 | 27713 | 24.547 |
| End | TAA | 0.63 | 2495 | 2.23 |
| End | TAG | 0.22 | 848 | 0.76 |
| End | TGA | 0.15 | 591 | 0.53 |

[0389] In a further embodiment, the gene (adh) that encodes alcohol dehydrogenase was codon improved for higher expression in cyanobacteria, namely ABICyano1, and the gene (pdc) that encodes pyruvate decarboxylase was codon improved for higher expression in cyanobacteria, namely ABICyano1. In another embodiment, the gene that encodes the GFP marker was also codon optimized for higher expression in cyanobacteria.

Restriction Systems in Cyanobacterium sp. ABICyano1

[0390] Restriction systems are barriers for the introduction of DNA in cyanobacteria. Foreign DNA is degraded by restriction enzymes and other non-specific nucleases during its entry into a cell. An understanding of the restriction systems is therefore critical in developing new transformation systems and protocols, especially in uncharacterized bacteria.

[0391] In a cyanobacterial cell, restriction systems occur in pairs comprising a restriction enzyme (restriction endonuclease) and a specific DNA methyltransferase. Methylation of the restriction enzyme recognition sequence protects DNA in the cell from degradation by the corresponding restriction enzyme. In natural systems, this is one mechanism of protecting the cell from foreign invasion.

[0392] Different cyanobacterial cells have different restriction systems (compiled at, for example, http://rebase.neb.com). Knowing which restriction systems exist in a given host cell can allow one to protect foreign plasmid DNA prior to entry into the cell by treating it with either a specific methylase, or a general methylase, that allows for protection of the DNA from degradation by the host cell's restriction enzyme(s). This type of DNA methylation can provide an effective protection against restriction barriers during the transformation or conjugation process. The selection of suitable DNA methyltransferases relies on the thorough understanding of the restriction enzyme repertoire of the organism. Since restriction enzymes and DNA methyltransferases occur in pairs, identification of the restriction enzymes implies the existence and specificity of the corresponding DNA methyltransferases.

[0393] ABICyano1 was found to have an endogenous restriction enzyme system. This was initially observed using sequence analysis, which predicted the presence of AvaI and HgiDI (AcyI) in ABICyano1. Subsequent detection of restriction activity in ABICyano1 crude extracts confirmed this finding. As a result of detecting restriction activity, the appropriate methylating agent can be added to protect foreign genes from being degraded soon after entry into the cell. In an embodiment, methylation is performed in vivo during conjugation using a “helper plasmid” having genes encoding specific methylases that are capable of protecting the identified restriction sites from degradation. In another embodiment, the nucleic acid constructs to be transferred to ABICyano1 are first incubated with methylases and then these methylated nucleic acid constructs are transformed into ABICyano1.

[0394] FIG. 6 depicts an image of an agarose gel having undergone electrophoresis to show how methylation of a plasmid only containing antibiotic resistance genes may at least partially protect it from digestion by a crude extract of ABICyano1. A plasmid including AvaI and AcyI (BsaHI) restriction sites, was incubated with ABICyano1 crude extract, either with or without methylation to protect the plasmid (first plasmid: AvaI: 2×, AcyI: 2×). From left to right; lane 1: plasmid without crude extract, lane 2: methylated plasmid without crude extract, lane 3: plasmid with crude extract (digestion), lane 4: methylated plasmid with crude extract. Thus, as depicted in FIG. 55, the plasmid was fully protected from digestion by the methylation procedure.

[0395] Restriction enzymes whose recognition sites contain a CG stretch might be impaired or blocked in cleavage by use of the CG-methylase M.SssI which methylates cytosine at the C5 position. AcyI and AvaI, which were detected in the ABICyano1 crude extract, recognize GRCGYC and CYCGRG, respectively. For example, pRL528, a helper plasmid for conjugal transfer, as described in Elhai and Wolk, 1988, can be used for in vivo methylation of the vectors to be transferred to Cyanobacterium sp., in particular ABICyano1. Helper plasmid pRL528 includes the M. AvaI gene coding for the methyltransferase protecting against the restriction endonuclease AvaI and the respective gene coding for M. AvaII. The latter is not required for transformation of ABICyano1, as it lacks AvaII endonuclease activity.

### Transformed ABICyano1

[0396] In an embodiment, genetically enhanced Cyanobacterium sp. host cells, in particular ABICyano1 host cells, include at least one recombinant gene encoding at least one protein that is involved in a biosynthetic pathway for the production of a compound or marker protein. In certain embodiments, they comprise an ethanologenic cassette. In certain embodiments, the genetically enhanced Cyanobacterium host cells can be used for the production of various compounds of interest by culturing the host cells under harsh conditions of high temperature, high oxygen levels and in the case of the compound being ethanol, under high levels of ethanol in the medium. In an embodiment, a marker protein, or reporter protein, can be a fluorescent protein, such as a red or green fluorescent protein. In an embodiment, a marker protein, or reporter protein, can be a marker gene conferring resistance to a biocide such as an antibiotic which can be used to select for and maintain cultures of Cyanobacterium sp. host cells in the presence of other bacterial contaminating strains.

[0397] In another embodiment, a recombinant gene is present on an extrachromosomal plasmid that can replicate independently from the chromosomes of the Cyanobacterium sp. host cells such as ABICyano1. In an embodiment, the extrachromosomal plasmids described herein are present in high copy numbers in the host cells so that a Compound of interest can be produced in a high yield.

[0398] Genetically enhanced Cyanobacterium sp., for example ABICyano1 host cells, can include further genetic enhancements such as partial deletions of endogenous genes of Cyanobacterium sp. or other recombinant genes which can increase the overall yield of the compound being produced by the host cells. For example, if the compound to be produced is ethanol, the genetic enhancements can relate to the knock out of endogenous genes coding for enzymes converting pyruvate or acetyl-CoA into a reserve or storage compound. In another embodiment, if the compound to be produced is ethanol, the genetic enhancements can relate to the overexpression of enzymes of the glycolysis pathway. Calvin-cycle, amino acid metabolism, the fermentation pathway, the citric acid cycle, and other intermediate steps of metabolism in order to increase the production of ethanol by the Cyanobacterium sp. host cells. Examples of such genetic enhancements are described in PCT patent publication number WO 2009/098089 A2 starting from page 70 and following, which is hereby incorporated by reference for this purpose.

[0399] In another embodiment, genetic enhancements of the genes encoding enzymes of the carbon fixation and subsequent carbohydrate metabolism (for example, pathways which compete with an ethanol production pathway) can be genetically enhanced to further increase the production of a compound of interest. Genetic enhancement targets include, but are not limited to, components of the photosystems (antennas and pigment modification), and components of the photosynthetic and respiratory electron transport systems. Genetic enhancement targets include local and global regulatory factors including, but not limited to, the two component system, sigma factors, small regulating RNAs and antisense RNAs.

[0400] In an embodiment, Cyanobacterium sp. host cells, e.g., ABICyano1 host cells, contain knockout mutations of endogenous genes that do not affect the toleration of being cultured in at least one of the following conditions: 1% (v/v) ethanol in the medium for at least 6, 12 or 16 weeks; 48° C., 50° C., 53 to 55° C. for at least 2 hours per day over a time period of at least 7 days, purging with 60% to 80% (v/v) oxygen (resulting in oxygen concentrations of up to 1000 μmol/L in the culture during the day).

### Compounds of Interest Produced by ABICyano1

[0401] In certain embodiments, a variety of different compounds of interest can be produced using genetically enhanced ABICyano1 host cells. Plasmid vectors disclosed herein (e.g., derivatives of p6.8) can be used to early a gene or genes involved in various biosynthetic pathways that produce a compound of interest in the ABICyano1 cell. Exemplary compounds of interest include, but are not limited to, organic carbon compounds, alcohols, fatty acids, oils, carotenoids, proteins, enzymes, biofuels, nutraceuticals, pharmaceuticals, and the like. Additional information on compounds that can be produced from cyanobacteria can be found, for example, in PCT/EP2009/000892 and in PCT/EP20091060526, both of which are incorporated by reference herein in their entirety. Genes involved in the biosynthetic pathway for the production of a compound of interest can be inserted into the vector.

[0402] In one embodiment, propanol and butanol are compounds of interest. Similar to ethanol, they can be produced by fermentation processes. In certain embodiments, genes encoding enzymes involved in isopropanol and isobutanol fermentation are incorporated into recombinant vectors and transformed into ABICyano1. Examples of enzymes involved in isopropanol fermentation include acetyl-CoA acetyltransferase (EC 2.3.1.9), acetyl-CoA:acetoacetyl-CoA transferase (EC 2.8.3.8), acetoacetate decarboxylase (EC 4.1.1.4) and isopropanol dehydrogenase (EC 1.1.1.80). Examples of enzymes involved in isobutanol fermentation include acetolactate synthase (EC 2.2.1.6), acetolactate reductoisomerase (EC 1.1.1.86), 2,3-dihydroxy-3-methylbutanoate dehydratase (EC 4.2.1.9), α-ketoisovalerate decarboxylase (EC 4.1.1.74), and alcohol dehydrogenase (EC 1.1.1.1).

[0403] In another embodiment, ethylene is produced as a compound of interest. In an embodiment, at least one recombinant gene encodes an enzyme for ethylene formation. Examples of enzymes involved in the production of ethylene include ethylene forming enzyme 1-aminocyclopropane-1-carboxylate oxidase (EC 1.14.17.4), which catalyzes the last step of ethylene formation, the oxidation oft-aminocyclopropane-1-carboxylic acid to ethylene. The substrate for the ethylene forming enzyme is synthesized by the enzyme 1-aminocyclopropane-1-carboxylic acid synthase (EC 4.4.1.14) from the amino acid methionine.

[0404] In another embodiment, the compound of interest is isoprene. In an embodiment the recombinant vector used to transform a cyanobacterial host cell for the production of isoprene includes at least one recombinant gene encoding an enzyme such as isoprene synthase. Isoprene synthase (EC 42.3.27) Catalyzes the chemical reaction from dimethylallyl diphosphate to isoprene and pyrophosphate.

[0405] In another embodiment, compounds of interest are terpenes and terpenoids. Terpenes are a large and very diverse class of organic compounds, produced primarily by a wide variety of plants, particularly conifers. Terpenes are derived biosynthetically from units of isoprene and are major biosynthetic building blocks in nearly every living organism. For example, steroids are derivatives of the triterpene squalene. When terpenes are modified chemically, such as by oxidation or rearrangement of the carbon skeleton, the resulting compounds are generally referred to as terpenoids. Terpenes and terpenoids are the primary constituents of the essential oils for many types of plants and flowers. Examples of biosynthetic enzymes are farnesyl diphosphate synthase (EC 2.5.1.1), which catalyzes the reaction of dimethylallyl diphosphate and isopentenyl diphosphate yielding farnesyl diphosphate. Another example is geranylgeranyl diphosphate synthase (EC 2.5.1.29), which catalyzes the reaction between transfarnesyl diphosphate and isopentenyl diphosphate yielding pyrophosphate and geranylgeranyl diphosphate.

[0406] In and embodiment, the compound of interest is hydrogen, and the recombinant genes can, for example, encode for hydrogenase. In an embodiment, hydrogenase is an enzyme catalyzing the following reaction: 12H⁺+12X_{reduced}→6H₂+12X_{oxidized}, where X is an electron carrier such as ferredoxin.

[0407] In an embodiment, examples of compounds of interest include non-ribosomal peptides (NRP) and the polyketides (PK). These compounds are synthesized by plants, fungi and only a few bacteria such as actinomycetes, myxobacteria and cyanobacteria. They are a group of structurally diverse secondary metabolites and often possess bioactivities that are of pharmacological relevance. Hybrids of non-ribosomal peptides and polyketides also exist, exhibiting both peptide and polyketide parts. Recombinant genes for the production of non-ribosomal peptides as compounds of interest are encoded by, for example, gene clusters encoding for non-ribosomal peptide synthetases (NRPS). NRPS are characteristic modular multidomain enzyme complexes encoded by modular non-ribosomal peptide synthetase gene clusters. Examples for non-ribosomal peptide synthetases are actinomycin synthetase and gramicidin synthetase.

[0408] In an embodiment, polyketides are compounds of interest. In general, there are two distinct groups of polyketides, the reduced polyketides of type I, macrolides, and the aromatic polyketides of type II. Type I polyketides are synthesized by modular polyketide synthases (PKS), which are characteristic modular multidomain enzyme complexes encoded by modular PKS gene clusters. Examples for recombinant genes useful for encoding enzymes for the production of type I polyketides are the rapamycin synthase gene cluster and the oleandomycin synthase gene cluster. One example for a recombinant gene for type II polyketides is the actinorhodin polyketide synthase gene cluster.

[0409] In another embodiment, hybrids of polyketides and non-ribosomal peptides are compounds of interest. Examples for recombinant genes for the production of hybrids of polyketides and non-ribosomal peptides are the microcystin synthetase gene cluster, microginin synthetase gene cluster, and myxothiazole synthetase gene cluster.

[0410] In another embodiment, alkaloids are compounds of interest. Alkaloids are a group of compounds containing mostly basic nitrogen atoms and which are synthesized by many organisms, including plants. Alkaloids have highly complex chemical structures and pronounced pharmacological activities. Examples for biosynthetic enzymes for alkaloids which can be encoded by recombinant genes for the production of the compound are strictosidine synthase, which catalyzes the reaction of tryptamine and secologanin to form 3a(S)-strictosidine. Strictosidine is a precursor for the biosynthetic pathway of ajmaline and it also initiates all pathways leading to an entire monoterpene indole alkaloid family. Another example of an enzyme that could be encoded by a recombinant gene is strictosidine glucosidase from the ajmaline biosynthetic pathway. This enzyme is able to activate strictosidine by deglycosylation, thus generating an aglycon which is the precursor for more than 2,000 monoterpenoid indole alkaloids.

[0411] In an embodiment, additional examples of enzymes encoded by at least one recombinant gene are (R,S)-3′-hydroxy-N-methylcoclaurine 4′-O-methyltransferase (4′OMT) which is central to the biosynthesis of most tetrahydrobenzylisoquinolin-derived alkaloids; berberine bridge enzyme (BBE) of the sanguinarine pathway; (R,S)-reticuline 7-O-methyltransferase (7OMT) part of laudanosine formation; as well as salutaridinol 7-O-acetyltransferase (SalAT) and codeinone reductase involved in the production of morphine.

[0412] In yet another embodiment, vitamins are compounds of interest. Vitamins are organic compounds that are essential nutrients for certain organisms and act mainly as cofactors in enzymatic reactions but can also have further importance, e.g. as antioxidants. In plants, vitamin C can be made via the L-ascorbic acid (L-AA) biosynthetic pathway starting from D-glucose. In an embodiment, recombinant genes encoding for enzymes involved in vitamin C synthesis are disclosed and include hexokinase, glucose-6-phosphate isomerase mannose-6-phosphate isomerase phosphomannomutase mannose-1-phosphate guanylyltransferase, GDP-mannose-3,5-epimerase, GDP-L-galactose phosphorylase, L-galactose 1-phosphate phosphatase, L-galactose dehydrogenase, and L-galactono-1,4-lactone dehydrogenase.

[0413] In another embodiment amino acids are compounds of interest. Amino acids as compounds of interest include naturally occurring amino acids as well as amino acid derivatives.

[0414] In an embodiment, lactams are compounds of interest. Lactams are cyclic amides and the prefix indicates how many carbon atoms (apart from the carbonyl moiety) are present in the ring. For example, β-lactam (2 carbon atoms outside the carbonyl, 4 ring atoms in total), γ-lactam and 5), δ-lactam (4 and 6). One example for a γ-lactam is pyrrolidone, a colorless liquid which is used in industrial settings as a high-boiling, non-corrosive, polar solvent for a wide variety of applications. Pyrrolidone is also an intermediate in the manufacture of polymers such as polyvinylpyrrolidone and polypyrrolidone.

[0415] In another embodiment, ethers are compounds of interest. Ethers are a class of organic compounds that contain an ether group, an oxygen atom connected to two alkyl or aryl groups of general formula R—O—R. An example of an ether is tetrahydrofuran (THF) which is a colorless, water-miscible organic liquid. THF is a heterocyclic compound and is one of the most polar ethers miscible in many solvents. THF is also useful as a solvent and as a precursor to polymers. Other examples of ethers that are compounds of interest include natural occurring ethers such as divinyl ether oxylipins. Enzymes involved in the biosynthesis of divinyl ether oxylipins include lipoxygenase and divinyl ether synthase.

[0416] In yet another embodiment, alkanes (also known as saturated hydrocarbons) are compounds of interest. Alkanes consist only of the elements carbon (C) and hydrogen (H), i.e. hydrocarbons. When the carbon and hydrogen atoms of alkanes are linked together exclusively by single bonds, the alkanes are saturated alkanes. Each carbon atom must have 4 bonds (either C—H or C—C bonds), and each hydrogen atom must be joined to a carbon atom (H—C bonds). The simplest possible alkane is methane, CH₄. There is no limit to the number of carbon atoms that can be linked together. Alkanes, observed throughout nature, are produced directly from fatty acid metabolites. A two gene pathway, widespread in cyanobacteria, is responsible for alkane biosynthesis. In an embodiment, these genes may be part of the recombinant vector and include genes encoding for acyl-ACP reductase (EC 1.3.1.9) which converts a fatty acyl-ACP into a fatty aldehyde that may subsequently be converted into an alkane/alkene by an aldehyde decarbonylase (EC 4.1.99.5).

[0417] In an embodiment, biopolymers such as polyhydroxyalkanoates (PHAs) are compounds of interest. PHAs are linear polyesters produced in nature by bacterial fermentation of sugar or lipids. They are produced by the bacteria to store carbon and energy. The simplest and most commonly occurring form of PHA is the fermentative production of poly-3-hydroxybutyrate (P3HB) but many other polymers of this class are produced by a variety of organisms. PHAs include poly-4-hydroxybutyrate (P4HB), polyhydroxyvalerate (PHV), polyhydroxyhexanoate (PHH), polyhydroxyoctanoate (PHO) and their copolymers. In an embodiment, recombinant genes encoding for enzymes involved in P3HB synthesis are part of recombinant vectors. These genes include genes encoding β-ketothiolase (EC 2.3.1.9) that produces acetoacetyl-CoA which is converted to (R)-3-hydroxybutyryl-CoA (3HBCoA) by NADPH-dependent acetoacetyl-CoA reductase (EC 1.1.1.36). The 3HBCoA is subsequently polymerized by poly(3-hydroxyalkanoate) synthase (EC 2.3.1) and is converted to P3HB.

[0418] In an embodiment, esters, including fitly acid esters, are a compound of interest. Simple esters with lower chain alcohols (methyl-, ethyl-, n-propyl-, isopropyl- and butyl esters) are used as emollients in cosmetics and other personal care products and as lubricants. Esters of fatty acids with other alcohols, such as sorbitol, ethylene glycol, diethylene glycol and polyethylene glycol are consumed in foods, personal care, paper, water treatment, metal working fluids, rolling oils and synthetic lubricants. Fatty acids are typically present in the raw materials used for the production of biodiesel. A fatty acid ester (FAE) can be created by a transesterification reaction between fats or fatty acids and alcohols. The molecules in biodiesel are primarily fatty acid methyl esters FAMEs, usually obtained from vegetable oils by transesterification with methanol. The esterification of the ethanol with the acyl moieties of coenzyme A thioesters of fatty acids can be obtained enzymatically by a nonspecific long chain alcohol O-fatty-acyltransferase (EC 2.3.1.75) from Acinetobacter baylyi strain ADP1, for example.

[0419] In an embodiment, Cyanobacterium sp. host cells naturally contain the entire sequences of recombinant genes coding for enzymes used for the production of a compound of interest. In another embodiment, the Cyanobacterium sp. host cell contains the entire sequences of recombinant genes that encode for all of the enzymes used in a cascade of enzymatically catalyzed reactions that results in the production of a compound of interest.

[0420] In an embodiment, a first protein encoded by a first recombinant gene can produce a first intermediate which is further convened by a second protein encoded by a second recombinant gene into a second intermediate, which then in turn is further converted by a third protein encoded by a third recombinant gene into a third intermediate such that a sequence of reactions provide intermediates for the next enzyme leading to the eventual production of a compound of interest. In an embodiment, the recombinant genes encoding for the enzymes that catalyze the sequence of reactions can be introduced into ABICyano1 or other Cyanobacterium sp. host cells.

[0421] In an embodiment, the compounds of interest that are produced from recombinant ABICyano1 can be removed intermittently as the culture grows, or the compounds can be separated at the end of a batch growth period. The cultures can be grown indoors, or can be grown outdoors in enclosed containers such as bioreactors, or in another suitable type of container.

### Production of Ethanol in ABICyano1

[0422] In an embodiment, the 6.8 kb endogenous plasmid vector from ABICyano1 is genetically enhanced to include recombinant genes encoding for enzymes that produce a compound of interest. In an embodiment, the 6.8 kb endogenous plasmid vector from ABICyano1 is used as the backbone of a vector useful for introducing exogenous polynucleotides into non-naturally occurring ABICyano1 organisms for the production of a compound of interest.

[0423] In an embodiment, a compound of interest is ethanol, and the genetic enhancements to ABICyano1 include transforming with a p6.8 based vector that comprises one or more recombinant genes encoding for an enzyme used in ethanol production. In an embodiment the genes are adh and pdc. The gene pdc encodes for pyruvate decarboxylase (PDC), which catalyzes the interconversion between pyruvate and acetaldehyde. The gene adh encodes for alcohol dehydrogenase (ADH) which catalyzes the interconversion between acetaldehyde and ethanol. Thus. PDC and ADH act in concert to produce ethanol. In another embodiment, the gene is adhE which encodes for AdhE enzyme (alcohol dehydrogenase E) which catalyzes the interconversion between acetyl-coenzyme A and ethanol.

[0424] Ethanol produced by non-naturally occurring ABICyano1 organisms can be measured by any means well known in the art. In an embodiment, ethanol produced by ethanologenic non-naturally occurring ABICyano1 organisms is measured using gas chromatographic analysis of a growth media and/or the headspace above a growth media.

[0425] In an embodiment, PDC activity is measured by a photometric kinetic reaction that can be monitored at 340 urn using a spectrophotometer. Pyruvate is enzymatically converted to acetaldehyde by pyruvate decarboxylase, which is reduced to ethanol by ethanol dehydrogenase under NADH oxidation. In an embodiment, the PDC enzyme activity is related to the protein content and expressed as the specific activity of PDC.

[0426] In particular embodiments, the ADH enzyme is, for example, a Zn²⁺-dependent alcohol dehydrogenase such as AdhI from Zymomonas mobilis (ZmAdh) or the Adh enzyme from Synechocystis PCC 6803 (SynAdh encoded by the synadh gene). Alternatively or in addition, the enzyme is an iron-dependent alcohol dehydrogenase AdhII from Z. mobilis). The Zn²⁺-dependent alcohol dehydrogenase can, for example, be an alcohol dehydrogenase enzyme having at least 60%, 70%, 80%, 90% or even more than 90% sequence identity to the amino acid sequence of Zn^{°} dependent alcohol dehydrogenase from Synechocystis PCC 6803. Relative to other alcohol dehydrogenases, SynAdh (annotated open reading frame ski 192 from the Synechocystis PCC 6803 genome) favors higher overall ethanol production because the reduction of acetaldehyde to ethanol is preferred to the reaction from ethanol to acetaldehyde. Thus, in an embodiment, a SynAdh encoding recombinant gene is useful for production of ethanol in a host cell.

[0427] AdhE is an iron-dependent, bifunctional enzyme that interconverts acetyl coenzyme A to ethanol. One characteristic of iron-dependent alcohol dehydrogenases (e.g. AdhE and AdhII) is their sensitivity to oxygen. In an embodiment, AdhE used to transform ABICyano1 is derived from thermophilic organisms such as Thermosynechococcus elongatus BP-1. In another embodiment, AdhE is from E. coli. In the case of AdhE from E. coli, a mutant was described that exhibited alcohol dehydrogenase activity under aerobic conditions, see Holland-Staley et al., J Bacteriol. 2000 November; 182 (21):6049-54. The E568K AdhE mutant of the E. coli AdhE was active both aerobically and anaerobically. Thus, in an embodiment, site-directed mutants of various AdhE enzymes could impart catalytic function to AdhE enzymes under both aerobic and anaerobic conditions in genetically enhanced ABICyano1 host cells.

[0428] In an embodiment, pyruvate decarboxylase can, for example, be from Zymomonas mobilis, Zymobacter palmae or the yeast Saccharomyces cerevisiae. In an embodiment, nucleic acid sequences, protein sequences and properties of ethanologenic enzymes such as alcohol dehydrogenases and pyruvate decarboxylases disclosed herein, can be found within PCT patent application WO 2009/098089 A2, which is hereby incorporated for this purpose.

[0429] In an embodiment, PDC and ADH are expressed in a genetically enhanced ABICyano1 that produces ethanol. In an embodiment, additional genes that are involved in biosynthetic pathways are inserted. For example, FIG. 7 depicts a map of the plasmid construct TK225 (pABICyano1-6.8 PnirAABICyano1-PDC(opt1)-synADH(opt1)-PrbcABICyano1-Km**-oriVT). Its nucleotide sequence is SEQ ID NO: 42. P_{rbcL} from Cyanobacterium sp. ABICyano1 runs from nucleotides 3574 to 4099, the codon improved kanamycin resistance cassette Km** is located from nucleotides 4101 to 4916, the origin of replication and transfer oriVT is located from nucleotides 5159 to 6217 in an antisense direction, P_{nirA} runs from nucleotides 96 to 378, the codon improved variant of SynAdh denoted “synADH” is located from nucleotides 2203 to 3210, the codon improved variant from pyruvate decarboxylate runs from nucleotides 379 to 2085. The genes can be codon optimized for optimal expression in ABICyano1 and can utilize any suitable promoter and regulatory sequences.

### Ethanologenic Cassettes

[0430] In an embodiment, ethanologenic cassettes are introduced into ABICyano1 host cells and those ABICyano1 host cells are used for the production of ethanol. Ethanologenic cassettes disclosed herein vary in promoters used as well as the source of adh and pdc genes.

[0431] In an embodiment, an ethanologenic gene cassette is codon-optimized for ABICyano1. As described in the examples, two different codon-optimized ethanologenic gene cassettes were used for the transformation of ABICyano1 and subsequent production of ethanol, pdc(opt1)-synadh(opt1), and pdc(opt3)-synadh(opt3). The pdc genes were derived from the Z. mobilis pdc and the adh genes from Synechocystis PCC 6803 adh. Optimization of the opt1 version was manually codon optimized by replacing all rare codons for one amino acid by the most frequently occurring codon for that amino acid based on ABICyano1 codon usage. The ethanologenic gene cassette opt3 was optimized using a two-step process which involved two programs (Optimizer and GENE designer DNA 2.0) which led to codon optimization similar to the codon usage of ABICyano1.

[0432] In an embodiment, and as depicted in table 4, ethanologenic plasmids derived from p6.8 and containing an ethanologenic cassette are used for the transformation of ABICyano1. Table 8 also depicts the ethanol production in transformed ABICyano1 cells. The ethanol production was measured in GC vials. These plasmids of table 4 contain various configurations of ethanologenic cassettes, having a gene encoding PDC and a gene encoding ADH. Various promoters, as listed in table 4 below, were used. Also, the genes were codon improved for expression in ABICyano1. Different origins of the genes from various organisms are also noted in table 4. Any of the ethanologenic cassettes may be present in modified organisms of the present invention.

TABLE 4

| Plasmid | | % EtOH/OD*d |
|---|---|---|
| FIG. | | (measured in |
| SEQ ID NO: | Construct | GC Vial) |
| pRL528 | Helper plasmid for conjugal | Used to assist |
| | transfer, M. AvaI, M. AvaII | in conjugation |
| | (Elhai & Wolk, 1988) | |
| TK225 | pABICyano1-6.8::P_{nirA} ABICyano1- | ~0.007 |
| FIG. 7 | PDC(opt1)-synADH(opt1)-P_{rbc} | |
| SEQ ID | ABICyano1-Km** | |
| NO: 42 | | |
| TK293 | pABICyano1-6.8::P_{nirA} ABICyano1- | 0.024 |
| FIG. 8 | PDC(opt1)-P_{rpsL} ABICyano1- | |
| SEQ ID | synADH(opt1)- P_{rbc} ABICyano1- | |
| NO: 43 | Km** | |
| TK295 | pABICyano1-6.8::P_{nirA} ABICyano1- | 0.005-0.01 |
| FIG. 9 | PDC(opt1)-P_{psbA} ABICyano1- | |
| SEQ ID | synADH(opt1)- P_{rbc} ABICyano1- | |
| NO: 44 | Km** | |
| TK229 | pABICyano1-6.8::P_{petE} ABICyano1- | 0.002 |
| FIG. 10 | PDC(opt1)-synADH(opt1)- P_{rbc} | |
| SEQ ID | ABICyano1-Km** | |
| NO: 45 | | |
| TK368 | pABICyano1-6.8::P_{petE} ABICyano1- | >>0.02 (not |
| FIG. 11 | PDC(opt1)- P_{rpsL} ABICyano1- | inducible but |
| SEQ ID | synADH(opt1)- P_{rbc} ABICyano1- | constitutive) |
| NO: 46 | Km** | |
| #1536 | pABICyano1-6.8::smtB- | ~0.006 (Zn²⁺ |
| | P_{smtA}(ABCC1535)-PDC(opt1)-P_{rpsL} | inducible) |
| | ABICyano1-synADH(opt1)- P_{rbc} | |
| | ABICyano1-Km** | |
| #1495 | pABICyano1-6.8::P_{nirA} ABICyano1- | 0.023 |
| FIG. 12 | zmPDCABICyano1 (opt3)-P_{rpsL} | |
| SEQ ID | ABICyano1-ADH ABICyano1 | |
| NO: 47 | (opt3)_ter-P_{rbc} ABICyano1-Km** | |
| #1578 | pABICyano1-6.8::P_{nirA} ABICyano1- | 0.031 |
| FIG. 13 | zmPDC ABICyano1 (opt3)-dsrA- | |
| SEQ ID | P_{rbc}*(optRBS)-synADH\oop-P_{rbc} | |
| NO: 48 | ABICyano1-Km** | |
| #1581 | pABICyano1-6.8::P_{nirA} ABICyano1- | 0.030 |
| FIG. 14 | zmPDC ABICyano1 (opt3)-dsrA-P_{rpsL} | |
| SEQ ID | ABICyano1-ADH ABICyano1 | |
| NO: 49 | (opt3)_ter-P_{rbc} ABICyano1-Km** | |
| TK441 | pABICyano1-6.8::P_{petJ} ABICyano1- | 0.017 |
| FIG. 15 | PDCopt1-P_{rpsL} ABICyano1- | |
| SEQ ID | synADHopt1-P_{rbc} ABICyano1-Km**- | |
| NO: 50 | oriVT | |

[0433] FIG. 16 depicts a map of the plasmid construct #1629 (pABICyano1-6.8::PnirA(opt2)-zmPDC(opt1)_dsrA-Prbc*(optRBS)-synADH(opt1)_ter) (SEQ ID NO: 51) including the endogenous nirA promoter from ABICyano1 with an improved ribosomal binding site (nucleotides 1 to 287 of SEQ ID NO: 51) in comparison to the respective native promoter. This modified promoter controls the transcription of a pdc gene, which can be codon improved.

[0434] FIG. 17 depicts a map of the plasmid construct #1636 (pABICyano1-6.8::PnirA*3-zmPDC(opt1)_dsrA-Prbc*(optRBS)-synADH(opt1)_ter) (SEQ ID NO: 52) including the endogenous nirA promoter from ABICyano1 with an improved binding, site for the regulators NtcA and NtcB and an improved TATA box (nucleotides 6 to 283 of SEQ ID NO: 52) in comparison to the respective native promoter. This modified promoter controls the transcription of a pdc gene, which can be codon improved.

[0435] FIG. 18 depicts a map of the plasmid construct #1630 (pABICyano1-6.8::corR-PcorT*1-zmPDC(opt1)_dsrA-Prbc*(optRBS)-synADH(opt1)_ter) (SEQ ID NO: 53) including the endogenous corT promoter from Synechocystis PCC 6803 with an improved ribosomal binding site (nucleotides 1168 to 1247 of SEQ ID NO: 53) in comparison to the respective native promoter. This modified promoter controls the transcription of a pdc gene, which can be codon improved.

[0436] FIG. 19 depicts a map of the plasmid construct 1631 (pABICyano1-6.8::corR-PcorT*2-zmPDC(opt1)_dsrA-Pibc*(optRBS)-synADH(opt1)_ter) (SEQ ID NO: 54) including the endogenous corT promoter from Synechocystis PCC6803 with an improved TATA box (nucleotides 1169 to 1247 of SEQ ID NO: 54) in comparison to the respective native promoter. This modified promoter controls the transcription of a pdc gene, which can be codon improved.

[0437] FIG. 20 depicts a map of the plasmid construct #1632 (pABICyano1-6.8::corR-PcorT*3-zmPDCABICyano1(opt1)_dsrA-Prbc*(optRBS)-synADH(opt1)_ter) (SEQ ID NO: 55) including the endogenous corT promoter from Synechocystis PCC6803 with an improved TATA box and ribosomal binding site (nucleotides 1169 to 1247 of SEQ ID NO: 55) in comparison to the respective native promoter. This modified promoter controls the transcription of a pdc gene, which can be codon improved. The nucleotide sequence of the plasmid is depicted in FIG. 37 including the annotation of the genes and promoters done with the program vector NTI.

[0438] FIG. 21 depicts a map of the plasmid construct #1635 (pABICyano1-6.8::smtB-PsmtA-zmPDC(opt1)_dsrA-Prbc*(optRBS)-synADH(opt1)_ter) (SEQ ID NO: 56) including the native smtA promoter from Synechococcus PCC7002 (nucleotides 480 to 581 of SEQ ID NO: 56). This promoter controls the transcription of a pdc gene, which can be codon improved.

[0439] FIG. 22 depicts a map of the plasmid construct #1639 (pABICyano1-6.8::smtB-PsmtA*1-zmPDC(opt1)_dsrA-Prbc*(optRBS)-synADH(opt1)_ter) (SEQ ID NO: 57) including a modified smtA promoter from Synechococcus PCC7002 which includes a modified RBS (nucleotides 394 to 494 of SEQ ID NO: 57) in comparison to the native promoter. This modified promoter controls the transcription of a pdc gene, which can be codon improved.

[0440] FIG. 23 depicts a map of the plasmid construct #1640 (pABICyano1-6.8::smtB-PsmtA*2-zmPDC(opt1)_dsrA-Prbc*(optRBS)-synADH(opt1)_ter) (SEQ ID NO: 58) including a modified smtA promoter from Synechococcus PCC7002 which includes another modified RBS (nucleotides 393 to 494 of SEQ ID NO: 58) in comparison to the native promoter. This modified promoter controls the transcription of a pdc gene, which can be codon improved.

[0441] FIG. 24 depicts a sequence comparison between the native promoter nirA from ABICyano1 and different variants of the promoter harboring nucleotide changes in the ribosomal binding site, the binding sites for the regulators NtcA and NtcB and the TATA box. These promoters are included in the plasmids #1606 (pABICyano1::PnirA-zmPDC(opt1)_dsrA-Prbc*(optRBS)-synADH(opt1)_ter) (FIG. 25) (SEQ ID NO: 59), #1629 and #1636.

[0442] FIG. 25 depicts a map of the plasmid construct #1606 (pABICyano1-6.8::PnirA-zmPDC(opt1)_dsrA-Prbc*(optRBS)-synADH(opt1)_ter) (SEQ ID NO: 51) including the endogenous nirA promoter from ABICyano1 (nucleotides 1 to 287 of SEQ ID NO: 51). This promoter controls the transcription of a pdc gene, which, in an embodiment, can be codon improved.

[0443] FIG. 26 depicts a nucleotide sequence comparison between different corT promoters including the native promoter from Synechocystis PCC 6803 and variants containing nucleotide changes in the TATA box, ribosomal binding site and the binding sites for the regulator corR is also depicted in FIG. 26. The promoters depicted in FIG. 26 are part of plasmids #1630, #1631 and #1632.

[0444] FIG. 27 depicts a nucleotide sequence comparison between the native smtA promoter from Synechococcus PCC 7002 and two different variants of the promoter containing mutations in the ribosomal binding site. These promoters are part of plasmids #1635, #1639 and #1640.

[0445] FIG. 28 depicts the ethanol production normalized to the growth (OD₇₅₀ₙₘ) determined by the CG vial method for ABICyano1 strains transformed with the plasmids #1606, plasmid #1629 and plasmid #1636 cultivated in 0.5 L PBRs for a period of time of at least 20 days.

[0446] FIG. 29 depicts the specific activity of PDC determined by the CG vial method for ABICyano1 strains transformed with the plasmids #1606, plasmid #1629 and plasmid #1636 for a period of time of about 20 days.

[0447] FIG. 30 depicts the specific activity of ADH determined by the CG vial method for ABICyano1 strains transformed with the plasmids #1606, plasmid #1629 and plasmid #1636 cultivated in 0.5 L PBRs for a period of time of about 20 days.

[0448] FIG. 31 depicts the ethanol production normalized to the growth (OD₇₅₀ₙₘ) determined by the CG vial method for ABICyano1 strains transformed with the plasmids plasmids #1606, plasmid #1631 and plasmid #1632 cultivated in 0.5 L PBRs for a period of time of at least 20 days.

[0449] FIG. 32 depicts the specific activity of PDC determined by the CG vial method for ABICyano1 strains transformed with the plasmids #1606, plasmid #1631 and plasmid #1632 cultivated in 0.5 L PBRs for a period of time of at least 20 days.

[0450] FIG. 33 depicts the specific activity of ADH determined by the CG vial method for ABICyano1 strains transformed with the plasmids #1606, plasmid #1631 and plasmid #1632 cultivated in 0.5 L PBRs for a period of time of at least 20 days.

[0451] FIG. 34 depicts the production of ethanol and acetaldehyde determined by the GC vial assay method from Cyanobacterium sp. ABICyano1 strains containing either one of ethanologenic plasmids TK293 and TK225.

[0452] FIGS. 35A to 35D depict the ethanol production rate, acetaldehyde accumulation and ADH and PDC activities of about a 15 day cultivation of Cyanobacterium sp. ABICyano1 containing the ethanologenic plasmid TK225. Panel A depicts ethanol production (percent ethanol per volume per day) panel B depicts acetaldehyde (percent w/v), panel C depicts PDC enzyme activity over time, and panel D depicts ADH enzyme activity over time.

[0453] FIGS. 36A to 36C depict ethanol production rate, cell growth and maximum ethanol production rate for 7 days from a 14 day cultivation of Cyanobacterium sp. ABICyano1 containing the ethanologenic plasmid TK293.

[0454] FIG. 37 depicts the ethanol production rates and the acetaldehyde accumulation determined by the GC vial method for Cyanobacterium sp. ABICyano1strains variously containing different ethanologenic plasmids TK293, #1495, #1578 and #1581 that were cultivated for 40 hours.

[0455] FIG. 38 depicts and compares (in the left panel) the PDC enzyme activity and (in the right panel) the ADH enzyme activity between ABICyano1 host cells each containing one of the plasmids TK293, #1495, #1578, and #1581.

[0456] In an embodiment, transformed ABICyano1 cells containing ethanologenic cassettes are grown under inducing conditions in mBG11 medium, and may be tested for ethanol production. ABICyano1 containing the plasmids TK293 and TK225 produced 0.086% (v/v) and 0.019% (v/v) ethanol, respectively, over a 50 h period in an online GC vial system (FIG. 34). Cultivation of ethanologenic ABICyano1 cells was performed in 0.5 L round PBR glass vessels containing marine BG11 culture medium. pH was controlled via CO₂ flux. Cell growth and ethanol production are shown in FIG. 35 and FIG. 36 for ABICyano1 containing TK225 and TK293, respectively.

[0457] Genetically enhanced ABICyano1 containing extrachromosomal plasmids with a pdc gene under the transcriptional control of either the native nirA promoter, or modified variants thereof, were cultured in 0.5 L photobioreactors. These enhanced ABICyano1 variously contained plasmids #1606, #1629 and #1636. FIG. 28 shows the ethanol production normalized to growth (OD₇₅₀ₙₘ) as determined by the CG vial method for ABICyano1 transformed with plasmids #1606 (a pdc gene under the control of the native P_{nirA}), plasmid #1629 (a pdc gene under the control of a variant of P_{nirA} with changes in the RBS) and plasmid #1636 (a pdc gene under the control of a modified variant of P_{nirA} with changes in the operator sequence and the TATA box). Ethanol production was measured over a period of at least 20 days after induction. Induction of P_{nirA} was realized by transition of the pre-culture to mBG11 medium containing nitrate for induction at the beginning of the cultivation experiment. FIG. 28 depicts that the normalized ethanol production is higher for ABICyano1 containing the plasmids with modified promoters. FIGS. 29 and 30 depict the specific activity of PDC enzyme and ADH enzyme during the course of cultivation. The inducible, modified nirA promoter variants PnirA*2 (#1629) and PnirA*3 (#1636) result in higher activity of PDC enzyme compared to the native promoter (#1606).

[0458] In an embodiment, a petJ promoter endogenous to ABICyano1 was identified and further characterized. Expression of P_{petJ} is tightly repressed under high copper (1-3 μM) conditions and induced under copper depletion as depicted in FIG. 39A. An ABICyano1 TK441 strain having the endogenous P_{petJ} upstream of an ethanologenic gene cassette produced the same amount of ethanol (Percent v/v) under copper depletion conditions as compared to an ABICyano1 TK293 strain grown in marine BG11 (FIGS. 39A and 39B).

[0459] FIG. 31 depicts ethanol production, as determined by the GC vial method, normalized to growth, as represented by absorbance at OD₇₅₀ₙₘ, for ABICyano1 transformed with plasmids #1606 (a pdc gene under the control of the native P_{nirA}), plasmid #1631 (a pdc gene under the control of a modified P_{corT} with modifications in the TATA box) and plasmid #1632 (a pdc gene under the control of a modified P_{corT} with modifications in the TATA box and the RBS). Ethanol production was measured for a period of time of at least 20 days while the cells were cultured in 0.5 L photobioreactors. The value for ethanol production of ABICyano1 transformed with plasmid #1606 is close to the value for ethanol production of ABICyano1 transformed with plasmid #1632. The ethanol production of the ABICyano1 transformed with plasmids #1631 exhibits a lower ethanol production rate than ABICyano1 transformed with plasmids #1606 and #1632, especially in the time period starting from about the tenth day of cultivation.

[0460] FIGS. 32 and 33 depict the specific activity of PDC enzyme and ADH enzyme during the course of cultivation. ABICyano1 transformed with plasmids #1632 and #1606 demonstrated higher activity of PDC enzyme than ABICyano1 transformed with plasmid #1631.

[0461] FIGS. 40, 41 and 42 depict the ethanol production rates of the ABICyano1 transformed with plasmid #1635, or plasmid #1639, or plasmid #1640, respectively. ABICyano1 strains containing plasmid #1635, or plasmid #1639, or plasmid #1640 all include the native P_{smtA} from Synechococcus PCC 7002 as well as modified versions of P_{smtA}. FIGS. 40, 41 and 42 demonstrate that the promoters are repressed in the absence of Zn²⁺ and can be induced upon addition of Zn²⁺.

[0462] In an example, modified vectors such as TK293, and #1536 as described herein, each containing an ethanologenic cassette and an antibiotic resistance gene under the transcriptional control of an ABICyano1 and/or an endogenous promoter of Synechococcus PCC 7002, respectively, are transformed into Synechococcus PCC 7002 using electroporation, conjugation or natural uptake. The transformants are selected for on an agar plate using the appropriate antibiotic. The putative transformants are then confirmed by PCR analysis. Positive cells are streaked and scaled up to grow as a culture. Ethanol production is measured. By use of this method, ethanol would be produced using a p6.8 derived vector containing an ethanologenic cassette using organisms other than those of the genus Cyanobacterium and/or ABICyano1.

### Continuous Production of Ethanol

[0463] FIG. 164 depicts the growth of TK293 (OD at 750 nm) which has an ethanologenic cassette with a pdc gene under control of the nirA promoter. As depicted in FIG. 164, TK293 was cultivated in a 0.5 L Crison PBR system and illuminated with 450 μE*m⁻²*s⁻¹ from two sides depicts. In FIG. 164, the red arrows indicate dilution steps conducted in order to keep the culture productive.

[0464] FIG. 165 depicts the ethanol production of the non-naturally occurring ethanologenic ABICyano1 strain TK293 which has an ethanologenic cassette with a pdc gene under control of the nirA promoter. As depicted in FIG. 165, a single inoculum of TK293 was cultivated in repeated dilutions in a 0.5 L Crison PBR system illuminated with 450 μE*m⁻²*s⁻¹ from two sides. In an embodiment, FIG. 165 depicts ethanol production from a single inoculum of TK293 over the course of 120 days. In an embodiment, about 2.89% (vol/vol) ethanol per bioreactor volume is produced as calculated by the sum of increase in percent ethanol (vol/vol) for each batch wherein all batches are derived from a single TK293 inoculum. In an embodiment, as depicted in FIG. 165, a first batch produces 0.65% ethanol (vol/vol) (rate of production is 0.0323% (vol/vol) per day), a second batch produces 0.25% ethanol (vol/vol) (rate of production is 0.0174% (vol/vol) per day), a third batch produces 0.17% ethanol (vol/vol) (rate of production is 0.0199% (vol/vol) per day), a fourth batch produces 0.43% ethanol (vol/vol) (rate of production is 0.0218% (vol/vol) per day), a fifth batch produces 0.48% ethanol (vol/vol) (rate of production is 0.0324% (vol/vol) per day), a sixth batch produces 0.46% ethanol (vol/vol) (rate of production is 0.0229% (vol/vol) per day), a seventh batch produces 0.37% ethanol (vol/vol) (rate of production is 0.0201% (vol/vol) per day), and an eighth batch produces 0.08% ethanol (vol/vol) (rate of production is 0.0136% (vol/vol) per day), the sum total of which is 2.89% (vol/vol) ethanol per bioreactor volume. In another embodiment, ethanol per bioreactor volume can be calculated by calculating the cumulative grams of ethanol produced per batch.

### Improved Ethanologenic Gene Cassettes for ABICyano1

[0465] In an embodiment, ethanologenic ABICyano1 strains with improved properties in relation to a TK293 reference strain are disclosed. Ethanol production is obtained by improvement of the ethanologenic gene cassette. In an embodiment, variants of plasmid TK293 are used as a starting point for modifications that result in improved ethanologenic constructs. In an embodiment, the constructs contain a pdc gene from Zymomonas mobilis under the control of a nirA promoter. Some constructs contain a codon-optimization Z. mobilis pdc gene (zmpdc) whose expression is controlled by an endogenous nirA promoter.

[0466] In an embodiment, the ethanologenic cassettes contain a synadh gene that is codon-optimized (synadh(opt1)). In an embodiment, the expression of synADH(opt1) is controlled by the endogenous rpsL promoter.

[0467] ABICyano1 strains containing the following constructs were tested for ethanol production, cell growth. ADH activity, and PDH activity:

[0468] TK293 [p171-6.8_PnirA-zmPDC(opt1)-PrpsL-synADH(opt1)_ter]

[0469] #1495 [p171-6.8_PnirA-zmPDC(opt3)-PrpsL-synADH(opt3)_ter]

[0470] #1578 [p171-6.8_PnirA-zmPDC(opt3)_dsrA-Prbc*(optRBS)-synADH_ter]

[0471] #1580 [p171-6.8_PnirA-zmPDC(opt1)_dsrA-PrpsL-synADH(opt1)_ter]

[0472] #1581 [p171-6.8_PnirA-zmPDC(opt3)_dsrA-PrpsL-synADH(opt3)_ter]

[0473] #1601 [p171-6.8_PnirA-zmPDC(opt1)_dsrA-Prbc*(optRBS)-synADH(opt3)_ter]

[0474] #1606 [p171-6.8_PnirA-zmPDC(opt1)_dsrA-Prbc*(optRBS)-synADH(opt1)_ter]

[0475] TK411 [p171-6.8_PnirA-zmPDC(opt3)-PrpsL-synADH(opt1)_ter]

[0476] TK412 [p171-6.8_PnirA-zmPDC(opt1)-PrpsL-synADH(opt3)_ter]

[0477] As depicted in FIG. 43, different variations of the components of the ethanologenic gene cassette were created. In an embodiment, one of the resulting constructs #1578 resulted in an improved ethanol production rate compared to TK293. Construct #1578 included the zmpdc gene with a third version of codon-optimization, an additional introduced transcriptional terminator dsrA, and the native synadh gene whose expression is controlled by the artificial rbc*(optRBS) promoter which is an improved variant of the rbcL promoter derived from Synechocystis PCC 6803.

[0478] FIG. 44 depicts cell growth, ethanol production and normalized ethanol production of ABICyano1 with TK293 or #1578. FIG. 45 depicts PDC and ADH activity in ABICyano1 with TK293 or #1578. FIG. 46 depicts overlays of the curve progression in regard to cell growth, overlays of the curve progression in regard to ethanol production, overlays of the curve progression in regard to the ethanol production rate and a comparison of the PDC and ADH activity between ABICyano1 #1578 and ABICyano1 TK293. As depicted in FIGS. 44 to 46, both components in combination with the additional terminator in between both genes result in an increased PDC as well as ADH activity over time which consequently lead to a higher ethanol production rate and at the same time reduced growth rate. This observation indicates a higher carbon-partitioning (amount of carbon fixed into ethanol versus fixed into biomass for strain ABICyano1 #1578 compared to ABICyano1 TK293 and demonstrates the high potential of optimizing the ethanologenic gene cassette in order to improve the ethanol productivity for ABICyano1 and other cyanobacteria.

[0479] As depicted in FIG. 38, ADH expression is controlled by promoter PrpsL. The expression level of the synADHopt3 cassette present in #1495 and #1581 is apparently less efficient compared to the expression level of the synADHopt1 present in ABICyano1 TK293 and ABICyano1 #1580. Not being limited by theory, this might be explained by the different codon-usage strategy applied for the synADHopt1 gene version as exemplified through testing constructs TK411 and TK412, comprising synADH(opt1) and synADH(opt3) respectively. TK411 exhibited a similar ADH activity asTK293 whereas TK412 revealed a relatively low ADH activity. This low ADH activity detected for TK412 was accompanied with an elevated acetaldehyde accumulation as found previously for #1495 and #1581, both with synADH(opt3). This clearly demonstrates the better performance of synADH(opt1) in relation to synADH(opt3).

[0480] Furthermore, analyses of ADH activity from ABICyano1 strains #1601 and #1606 confirmed the different efficiency when using synADH(opt3) vs. synADH(opt1). Strain #1601 [p171-6.8_PnirA-zmPDC(opt1)_dsrA-Prbc*(optRBS)-synADH(opt3)_ter] exhibited a relatively low ADH activity and consequently a higher acetaldehyde accumulation in GC vial assay whereas the experiments with strain #1606 [p171-6.8_PnirA-zmPDC(opt1)_dsrA-Prbc*(optRBS)-synADH(opt1)_ter] indicated a higher ADH activity in relation to #1601 and thus a lower acetaldehyde accumulation. Nevertheless, the highest activity found for the different gene variants of synADH was surprisingly accomplished by the native synADH (ABICyano1 #1578) without any codon-optimization for use in ABICyano1. Codon optimization is usually needed for efficient protein expression in ABICyano1 because it has a strong AT bias in endogenous codon-usage.

[0481] Although strains ABICyano1 #1495 and ABICyano1 #1581 differ in the dsrA terminator downstream from the pdc gene, the PDC expression in ABICyano1 #1581 was found to be substantially increased, see FIG. 47. This is an indication that introduction of an efficient transcript termination signal apparently results in a higher and/or more stable mRNA levels and consequently in an increased PDC protein expression. In ABICyano1 #1578 growth is thereby reduced but the ethanol production is significantly increased demonstrating that the improved PDC expression results in an improved relative production of ethanol in comparison to biomass.

[0482] The data depicted in table 5 demonstrate the improved (when compared to TK293) production rate of ethanol as well as the reduced acetaldehyde accumulation due to elevated PDC and ADH activities for ABICyano1 that has been genetically enhanced with construct #1578. FIGS. 44 and 45 depict the cultivation of the corresponding cell lines TK293 and #1578 performed in 0.5 L Crison PBR round bottles illuminated from two sides with 450 μE*m⁻² s⁻¹ (900 μE m⁻² s⁻¹ total) for about 45 days including two dilution steps (see FIGS. 44 and 45). During this long-term cultivation the OD, the chlorophyll content, and the ethanol amount were measured.

TABLE 5

| | avg. GC rate | production rate | avg. Acetaldehyde conc. | Acetaldehyde conc. |
|---|---|---|---|---|
| construct | [% EtOH(v/v)/OD_{avg}* d] | in relation to TK293 | [% MeCHO (v/v)] | in relation to TK293 |
| TK293 | 0.0239 +/− 0.0007 | 100% | 0.000618 +/− 0.00004 | 100% |
| #1495 | 0.0225 +/− 0.0010 | 94% | 0.000818 +/− 0.00013 | 132% |
| #1578 | 0.0307 +/− 0.0012 | 128% | 0.000303 +/− 0.00005 | 49% |
| #1581 | 0.0300 +/− 0.0006 | 125% | 0.000832 +/− 0.00016 | 135% |

[0483] As depicted in FIG. 47, the introduction of alterations in the ethanologenic gene cassette resulted in improved expression and improved activity of PDC and synADH. The alterations enhanced ethanol productivity ABICyano1 by about 20-25%. While not being limited by theory, FIG. 48 depicts the higher ethanol production rate and lower growth for ABICyano1 #1578 as compared to TK293 and shows that PDC regulates the partitioning of carbon fixed by photosynthesis into biomass and ethanol. ABICyano1 #1578 thus increases total carbon fixation and ethanol production by about 10% compared to ABICyano1 TK293.

[0484] FIG. 49 depicts ethanol production in several ABICyano1 strains including copper-inducible promoters controlling the pdc expression. As depicted in FIG. 49, strainTK4S3 which contains P_{orf0221}, strain TK487 and strain #1772 which both contain P_{orf0316} produce more ethanol over the same amount of time than does strain TK293 that contains a P_{nirA} promoter controlling the pdc expression. All of the strains depicted in FIG. 49 were cultivated in a vPBR system at 230 μE*m⁻²*s⁻¹ (illuminated from one side) in a 12 h/12 day/night cycle.

### Ethanol Production by ABICyano1 Using Endogenous Metal Inducible Promoters

[0485] Promoters controlling the open reading frames found to be regulated by addition of the respective metal ions (based on RNAseq data and verified by qRT-PCR), were chosen to be used in constructs for ethanol production in ABICyano1. In an embodiment, a 300-500 bp fragment upstream of each start codon was selected and cloned into plasmid #1646 ((pABIcyano1-PnirA-zmPDC(opt1)dsrA-Prbc*(optRBS)-ADH111(opt)_ter) whose plasmid map is depicted in FIG. 125 (SEQ ID NO: 75), replacing the MIA promoter, in order to drive pdc transcription. ABICyano1 transformants were tested for ethanol productivity under repressed and induced conditions in GC vial experiments. FIG. 50 depicts the ethanol production of ABICyano1 TK293 (p171-6.8::PnirA-PDC(opt1)-PrpsL-synADH(opt1)_ter) compared to ABICyano1 TK483 (p171-6.8::Porf0221-zmPDC_(opt1)dsrA-Prbc*(optRBS)-ADH111(opt)_ter) in the presence and absence of 3 μM Cu²⁺. In the absence of copper, ethanol production rates are very low, indicating the tightness of Porf0221. By contrast, ethanol production of ABICyano1 TK483 in the presence of 3 μM Cu²⁺ is even higher compared to ABICyano1 TK293.

[0486] The ethanol productivity (percent ethanol (v/v)/OD/day) of each construct is shown in table 6 under repressed (without the respective metal ion) and induced conditions (10 μM Ni²⁺, 15 μM Zn²⁺, 3 μM Cu²⁺ or 5 μM Co²⁺). Tightness and strength of each promoter were also rated with a +/− scale, (see legend below Table 3). In an embodiment, ethanol production rates of all tested promoters can be divided into different categories as follows: 1) ethanol productivity was very low, even under inducing conditions (e.g. TK500), 2) ethanol productivity was quite high, however, the promoter was not repressible (e.g. TK501) and 3) ethanol productivity was quite high and promoter repressible/inducible (e.g. TK483). In some cases two constructs were generated for one promoter (e.g. TK493/TK527 for Porf0128), as two putative start codons for the respective gene could be deduced.

TABLE 6

| | ABICyano1 | | inductor/ | | | % EtOH(v/v)/OD/d | % EtOH(v/v)/OD/d |
|---|---|---|---|---|---|---|---|
| construct | promoter | gene | repressor | tightness | strength | repressed | induced |
| TK493/TK527 | _orf0128 | | −Ni | | | no | no |
| TK501 | _orf1486 | | +Ni | − | +++ | 0.021 | 0.024 |
| TK502 | _orf3164 | | +Ni | ++ | − | 0.002 | 0.003 |
| TK500 | _orf3293 | | −Ni | ++ | − | 0.003 | 0.004 |
| TK491 | _orf3621 | | +Ni | ++ | − | 0.003 | 0.007 |
| TK492 | _orf3635 | oprB | −Ni | −− | ++ | 0.018 | 0.017 |
| TK480* | _orf1071 | mntC | +Zn/ | ++ | +++ | 0.004 | 0.025 |
| | | | +Mn | | | (40 μM | |
| | | | | | | Mn2+) | |
| TK481 | _orf1072 | mntA | +Zn | | | no | no |
| TK482/TK528 | _orf1074 | mntB | + Zn | | | no | no |
| TK503 | _orf1075 | | +Zn | | | no | no |
| TK489 | _orf1542 | | +Zn | −− | ++ | 0.015 | 0.021 |
| TK488 | _orf1823 | sigH | +Zn | ++ | + | 0.003 | 0.011 |
| TK490* | _orf3126 | | +Zn | − | +++ | 0.007 | 0.02 |
| TK483* | _orf0221 | | +Cu | ++ | ++ | 0.001 | 0.023 |
| TK484 | _orf0222 | | +Cu | | | no | no |
| TK504* | _orf0223 | | +Cu | ++ | +++ | 0.007 | 0.035 |
| TK487* | _orf0316 | | +Cu | ++ | +++ | 0.003 | 0.021 |
| TK485/TK529 | _orf3232 | pacS | +Cu | | | no | no |
| TK441 | _orf3461 | petJ | −Cu | ++ | ++ | no | 0.018 |
| TK486 | _orf3749 | | +Co | | | 0.001 | 0.001 |

[0487] In another embodiment, producer ABICyano1 host cell strains were hybrids carrying the Zn²⁺ inducible constructs TK480 and TK490 as well as the Cu²⁺ inducible TK483, TK487 and TK504. All five constructs are very tightly repressed under appropriate conditions (lack of inducer metal) and led to high ethanol production rates after metal ion addition. TK480 uses a mntC promoter, which was shown in Synechocystis PCC 6803 to be regulated by manganese (Ogawa et al., 2002). Hence repression by addition of Mn²⁺ was tested, see table 6, and addition of 40-50 μM Mn²⁺ led to a repression.

[0488] Thus, orf022.1 encodes for a putative multi-copper oxidase (copper-resistance protein), while orf223 and orf0316 are hypothetical genes with unknown function. All three genes/proteins are believed to have not been previously described in the literature, induction by copper was not known. Based on homology to other copper regulated genes, none of the three endogenous promoters from ABICyano1 would have been chosen to control pdc expression. However, the three promoters respond strongly to copper and were shown to tightly control ethanol production in ABICyano1. Because the response to copper declines within about 5 days, additional copper needs to be supplemented during long term ethanol production experiments. In an embodiment, the copper repressible promoter of petJ (orf3461) is useful. No ethanol production was observed with the promoter of orf3232, encoding for a heavy metal ATPase. As the copper response stayed at a constant level up to about day 5, the promoter of orf3232 could be useful for longer productivity. Not being bound by theory, one explanation is that both cloned translational start codons are selected in the upstream region of about 500 bp and might not use the entire functional promoter.

[0489] In another embodiment, the Zn²⁺ responding promoter of the smtA like orf3126 improved amounts of produced ethanol. However, basal (repressed) production rates were too high. Additional genetic improvement of Porf3126 could enhance the tightness of control for expression of PDC and ethanol production in non-naturally occurring ethanologenic ABICyano1 organisms. By contrast, the Zn²⁺ responding promoter of the manganese transporter operon (mite) is substantially repressed by addition of 40 μM Mn²⁺.

[0490] Thus, at least three Cu²⁺ responding (Porf0221, Porf0223 and Porf0316) and two Zn²⁺ responding promoters (Porf1071 and Porf3126) are useful as promoters to drive pdc expression in ABICyano1 ethanologenic strains.

[0491] In an embodiment, the sequences, putative operator regions, putative −10 regions, putative transcription starting points, start codons, and putative ribosome binding sites of endogenous copper inducible promoters Porf0316, Porf3416 (PpetJ), and zinc inducible promoters Porf3126 (PsmtA-like), Porf1071 (PmntC also manganese inducible) are depicted in FIG. 51.

[0492] In an embodiment, a transcription terminator can be present between the first and second recombinant gene in order to ensure a separate transcriptional control of the first and second recombinant gene and to provide for a high production of a compound of interest, such as ethanol. In an embodiment for an ethanologenic cassette used to produce ethanol as a compound of interest, a first recombinant gene encodes pyruvate decarboxylase and the second recombinant gene encodes alcohol dehydrogenase. The first recombinant gene (pdc) is under the transcriptional control of a first inducible promoter and the second recombinant gene (adh) is under the transcriptional control of a second constitutive promoter. The first inducible promoter can be selected from, for example, PnirA, variants PnirA*2, PnirA*3, PnirA*4, PmntC, P_{orf3126}, P_{orf0221}, P_{orf0223}, and P_{orf0316} and the second constitutive promoter can be selected from for example, PrpsL*4, Prbc*(optRBS), and PcpcB.

[0493] RNA-seq experiments were conducted in order to identify potential metal-ion inducible promoters in ABICyano1. The upstream regions of the metal-ion responding/inducible genes in ABICyano1, listed in the table below, were selected to drive/control expression of the ethanologenic gene cassette in ABICyano1. The nucleic acid sequences are given in the Figures as listed in this table. All of the below potential inducible promoters are prime candidates for the transcriptional control of the at least one recombinant gene. Expression of petJ is tightly repressed under high copper (1-3 μM) conditions and induced under copper depletion (FIG. 39). ABICyano1 TK441 strains carrying the endogenous petJ promoter upstream of an ethanologenic gene cassette, produce the same amount of ethanol (% v/v) under copper depletion conditions compared to an ABICyano1 TK293 strain grown in marine BG11 (FIGS. 39A and 39B).

[0494] A plasmid map for TK480 (pABICyano1-6.8::PmntC ABICyano1-zmPDC(opt1)dsrA-Prbc*(optRBS)-ADH111(opt)) is depicted in FIG. 52. The sequence of TK480 is listed in SEQ ID NO: 60.

[0495] A plasmid map for TK483 (pABICyano1-6.8::Porf0221-zmPDC(opt1)dsrA-Prbc*(optRBS)-ADH111(opt)) is depicted in FIG. 53. The sequence of TK483 is listed in SEQ ID NO: 61.

[0496] A plasmid map for TK487 (pABIcyano1-Porf0316-zmPDC(opt1)dsrA-Prbc*(optRBS)-ADH111(opt)_ter) is depicted in FIG. 54. The sequence of TK487 is listed in SEQ ID NO: 62.

[0497] A plasmid map for TK488 (pABICyano1-6.8::PsigHABICyano1-zmPDC(opt1)dsrA-Prbc*(optRBS)-ADH111(opt)) is depicted in FIG. 55. The sequence of TK488 is listed in SEQ ID NO: 63.

[0498] A plasmid map for TK489 (pABICyano1-6.8::Porf1542-zmPDC(opt1)dsrA-Prbc*(optRBS)-ADH111(opt)) is depicted in FIG. 56. The sequence of TK489 is listed in SEQ ID NO: 64.

[0499] A plasmid map for TK490 (pABICyano1-6.8::Porf3126-zmPDC(opt1)dsrA-Prbc*(optRBS)-ADH111(opt)) is depicted in FIG. 57. The sequence of TK480 is listed in SEQ ID NO: 65.

[0500] A plasmid map for TK504 (pABICyano1-6.8::Porf0223 ABICyano1-zmPDC(opt1)dsrA-Prbc*(optRBS)-ADH111(opt)) is depicted in FIG. 58. The sequence of TK504 is listed in SEQ ID NO: 66.

[0501] FIGS. 59 to 66 depict the ethanol production of various different ABICyano1 strains carrying different metal-inducible promoters upstream of the pdc gene determined by the GC online vial method.

[0502] FIG. 59 depicts the ethanol production of Cyanobacterium sp. ABICyano1 containing the plasmid TK480 wherein a codon improved variant of a gene coding for the native PDC enzyme is under the transcriptional control of the promoter mntC (orf1071) from ABICyano1, whereas the adh with the nucleotide sequence shown in FIG. 52 (nucleotides 2390 to 3406 of SEQ ID NO: 60 whose expressed enzyme is ADH111) is under the control of a variant of the native rbc promoter from ABICyano1 with an improved ribosomal binding site (RBS). Furthermore, the ethanol production of Cyanobacterium sp. ABICyano1 containing the plasmid #1770 is depicted in FIG. 59, which is comparable to the ethanol production of Cyanobacterium sp. ABICyano1 with the plasmid TK480. This plasmid #1770 only differs from plasmid TK480 by replacing the Adh enzyme of FIG. 52 (nucleotides 2390 to 3406 of SEQ ID NO: 60) with the Synechocystis Adh enzyme. It can clearly be seen that upon addition of 10 μM Zn²⁺ the ethanol production increased compared to the uninduced state with Zn²⁺ and 15 μM Mn²⁺ (repression by the absence of Zn²⁺ and presence of Mn²⁺) for both strains transformed with the plasmids #1770 and TK480, respectively. The ethanol production of Cyanobacterium sp. ABICyano1 including the plasmid TK488 after addition of 15 μM Zn²⁺ is shown in FIG. 60 in comparison to the uninduced state without Zn²⁺. Addition of Zn²⁺ leads to a nearly 4-fold increase in ethanol production.

[0503] The ethanol production of Cyanobacterium sp. ABICyano1 containing the plasmid TK489 is depicted in FIG. 61. This graph shows a continuously rising ethanol production with increasing cultivation time in the induced state upon addition of 15 μM Zn²⁺. However under uninduced conditions a high ethanol production can also be observed, which shows that this promoter is not wiry tight.

[0504] FIG. 62 depicts a graph evidencing the ethanol production in ABICyano1 transformed with the plasmid TK490 including a codon improved variant of pdc gene under the transcriptional control of the promoter controlling the open reading frame (ORF) 3126 versus the ethanol production of the same strain transformed with the plasmid #1773. This plasmid differs from TK490 only in the Adh enzyme which is Synechocystis Adh for #1773 versus the adh with the sequence of FIG. 52 (nucleotides 2390 to 3406 of SEQ ID NO: 60) in TK490. Both ABICyano1 strains have a comparable ethanol production up to 40 hours of cultivation, but the ethanol production appears to be higher for #1773 after 40 hours compared to TK490. A clear increase in ethanol production can be observed upon induction by 15 μM Zn²⁺ for both strains transformed with #1773 and TK490. A clear rise in ethanol production can also be seen upon induction with Cu²⁺ in (Cyanobacterium sp. ABICyano1 transformed with the plasmid TK487 and the plasmid #1772 (see FIG. 63). TK487 includes it codon improved valiant of the Zymomonas mobilis gene coding for PDC under the transcriptional control of the promoter controlling the ORF0316 and codon improved variant of the gene coding for ADH with the nucleotide sequence shown in FIG. 52 (nucleotides 2390 to 3406 of SEQ ID NO: 60) under the transcriptional control of Prbc with an improved RBS. The plasmid #1772 contains a gene coding for Synechocystis ADH instead of the ADH with the sequence of FIG. 52 (nucleotides 2390 to 3406 of SEQ ID NO: 60). Induction with copper leads to an increase in ethanol production for both ABICyano1 strains (see FIG. 63). The ethanol production increases hi comparison to the uninduced state (copper-free medium) upon addition of 0.3 μM Cu²⁺ and further increases, when both strains are induced with 6 μM Cu²⁺. A clear rise in ethanol production can be observed in comparison to the uninduced state (copper-free medium) by copper induction in ABICyano1 with strains containing the plasmids TK483 and #1771 upon addition of 0.3 μM and 6 μM Cu²⁺ (see FIG. 64). TK483 contains a copper inducible promoter controlling ORF0221 in ABICyano1 upstream of pdc. Similar to earlier mentioned plasmids, this plasmid also includes a codon improved variant of the gene coding for ADH 111 with the nucleotide sequence shown in FIG. 52 (nucleotides 2390 to 3406 of SEQ ID NO: 60) under the transcriptional control of Prbc with an improved RBS, whereas plasmid #1771 includes a gene coding for Synechocystis ADH instead of the ADH with the sequence of FIG. 52 (nucleotides 2390 to 3406 of SEQ ID NO: 60). The ethanol production of the ABICyano1 strain with the TK483 is slightly higher during a 60 hour cultivation in comparison to a strain transformed with plasmid #1771.

[0505] FIG. 65 depicts the ethanol production of a genetically enhanced Cyanobacterium sp. ABICyano1 transformed with plasmid TK504 and plasmid #1774. Plasmid TK504 includes the Cu²⁺ inducible promoter, which normally controls the transcription of ORF 0223. In plasmid TK504 this promoter controls the transcription of the codon improved gene coding for ZmPdc. As depicted in FIG. 65, TK504 produces ethanol at about 0.07% (vol/vol) per day. As in the above mentioned constructs TK504 ADH111 (nucleotides 2390 to 3406 of SEQ ID NO: 60) is controlled by Prbc with an improved RBS, whereas in plasmid #1774 the same promoter controls the transcription of a gene coding for SynAdh enzyme. FIG. 65 depicts ethanol production rate of ABICyano1 strains transformed with either of constructs #1774 and TK504. Strains #1774 and TK504 both comprise the endogenous copper-inducible promoter Porf0223 and were tested with (10Cu=3 μM Cu²⁺) and without copper ( 1/10Cu=0.03 μM Cu²⁺) and ethanol production was analyzed by the GC vial assay. As depicted in FIG. 65, the observed ethanol production rate of TK504 in the presence of 3 μM Cu²⁺ of 0.00292%(v/v)/h over about 50 hours corresponds to about 23.1 ma/(h*L) and to the production of ethanol at about 0.07% (v/v) per day as calculated from the rate of ethanol production depicted in FIG. 65 by TK504 of 0.00292%(v/v)/h multiplied by 24 hours/day. The highest productivity of TK504 in the presence of 3 μM Cu²⁺ was observed in the period from about 40-52 hours of the cultivation experiment when the rate of ethanol production was about 0.00392%(v/v)/H which corresponds 31 mg/(h*L) and corresponds to the a non-naturally ° mining ethanologenic ABICyano1 organism capable of producing ethanol at 0.094% (vol/vol) per day as calculated from the rate of ethanol production depicted in FIG. 65 by TK504 of 0.00392%(v/v)/h multiplied by 24 hours/day. In another embodiment, the rate of ethanol production depicted in FIG. 65 by TK504 is 0.047% (vol/vol) per twelve hours as calculated from the rate of ethanol production from hours 40 to 52 of growth of 0.00392% (v/v)/h multiplied by 12 hours.

[0506] FIG. 66 depicts the activities of PDC enzymes in the various ABICyano1 strains transformed with the plasmids TK483, TK487, TK504, #1771, #1772 and #1774 in the uninduced state and with the addition of 0.3, 6, 12 and 24 μM Cu²⁺. While the activities of PDC are very low in the repressed state, increasing activities can be detected with rising concentration of Cu²⁺, which clearly demonstrates that the new promoters found in ABIcyano1 can be induced by Cu²⁺. Table 7 is a listing of ABICyano1 endogenous promoters inducible by a change in the concentration of Ni²⁺, Cu²⁺ Co²⁺ and Zn²⁺.

[0507] Table 8 depicts ethanol production data of ABICyano1 strains containing plasmids with genes coding for PDC under the control of endogenous inducible promoters; “n.d” means “not determined”:

TABLE 7

| Gene_id | Plasmid | Homology | Inducible by |
|---|---|---|---|
| ABICyano1_orf0128 | TK493/ | hypothetical | Ni²⁺ |
| | TK527 | protein | |
| ABICyano1_orf1486 | TK501 | putative nickel- | Ni²⁺ |
| | | containing | |
| | | superoxide | |
| | | dismutase | |
| ABICyano1_orf3164 | TK502 | ferrochelatase | Ni²⁺ |
| ABICyano1_orf3293 | TK500 | hypothetical | Ni²⁺ |
| | | protein | |
| | | L8106_16134 | |
| ABICyano1_orf3621 | TK491 | hypothetical | Ni²⁺ |
| | | protein | |
| | | Cyan7822_1798 | |
| ABICyano1_orf3635 | TK492 | carbohydrate- | Ni²⁺ |
| | | selective porin | |
| ABICyano1_orf3858 | — | manganese/iron | Ni²⁺ |
| | | superoxide | |
| | | dismutase-like | |
| | | protein | |
| ABICyano1_orf1071 | TK480 | Mn transporter | Zn²⁺ |
| ABICyano1_orf1072 | TK481 | ABC | Zn²⁺ |
| | | transporter | |
| | | family protein | |
| ABICyano1_orf1074 | TK482 | ABC 3 transport | Zn²⁺ |
| | | family | |
| ABICyano1_orf1075 | TK503 | No hits found -\|- | Zn²⁺ |
| | | KEGG: -\|- | |
| | | CyanoBase | |
| ABICyano1_orf1542 | TK489 | hypothetical | Zn²⁺ |
| | | protein | |
| | | PCC8801_4423 | |
| ABICyano1_orf1823 | TK488 | RNA | Zn²⁺ |
| | | polymerase | |
| | | sigma factor | |
| ABICyano1_orf1824 | — | No hits found -\|- | Zn²⁺ |
| | | KEGG: -\|- | |
| | | CyanoBase | |
| ABICyano1_orf3126 | TK490 | Metallothionein | Zn²⁺ |
| ABICyano1_orf3389 | — | HtrA2 peptidase | Zn²⁺ |
| ABICyano1_orf0221 | TK483 | CopA family | Cu²⁺ |
| | | copper-resistance | |
| | | protein | |
| ABICyano1_orf0222 | TK484 | copper | Cu²⁺ |
| | | resistance B | |
| ABICyano1_orf0223 | TK504 | No hits found -\|- | Cu²⁺ |
| | | KEGG: -\|- | |
| | | CyanoBase | |
| ABICyano1_orf0316 | TK487 | hypothetical | Cu²⁺ |
| | | protein | |
| | | CY0110_11047 | |
| ABICyano1_orf3232 | TK485/ | cation- | Cu²⁺ |
| | TK529 | transporting | |
| | | ATPase | |
| ABICyano1_orf3461 | TK441 | petJ | Cu²⁺ depletion |
| ABICyano1_orf3749 | TK486 | conserved | Co²⁺ |
| | | hypothetical | |
| | | protein | |

TABLE 8

| | | EtOH | EtOH |
|---|---|---|---|
| | | (v/v)/OD*d | (v/v)/OD*d |
| | | Repressed | Induced |
| Gene_id | Plasmid | conditions | conditions |
| ABICyano1_orf1486 | TK501 | 0.021 | 0.024 |
| ABICyano1_orf3164 | TK502 | 0.0024 | 0.0029 |
| ABICyano1_orf3293 | TK500 | 0.0026 | 0.0035 |
| ABICyano1_orf3621 | TK491 | 0.003 | 0.007 |
| ABICyano1_orf3635 | TK492 | 0.018 | 0.017 |
| ABICyano1_orf3858 | — | n.d. | n.d. |
| ABICyano1_orf1071 | TK480 | 0.004 | 0.025 |
| ABICyano1_orf1542 | TK489 | 0.015 | 0.021 |
| ABICyano1_orf1823 | TK488 | 0.003 | 0.011 |
| ABICyano1_orf1824 | — | n.d. | n.d. |
| ABICyano1_orf3126 | TK490 | 0.007 | 0.02 |
| ABICyano1_orf3389 | — | n.d. | n.d. |
| ABICyano1_orf0221 | TK483 | 0.001 | 0.023 |
| ABICyano1_orf0223 | TK504 | 0.007 | 0.025 |
| ABICyano1_orf0316 | TK487 | 0.003 | 0.021 |
| ABICyano1_orf3461 | TK441 | 0.0001 | 0.017 |
| ABICyano1_orf3749 | TK486 | 0.001 | 0.001 |

[0508] In an embodiment, the plasmids TK441 to TK490 contain the inducible promoters from ABICyano1 listed in the table 7 and/or 8 controlling the transcription of codon improved variant genes coding for Zymomonas mobilis Pdc enzyme, in the following called ZmPdc. These plasmids further harbor different codon improved genes coding either for Synechocystis ADH or ADH with the nucleotide sequence shown in FIG. 52 (nucleotides 2390 to 3406 of SEQ ID NO: 60), which are all controlled by constitutive promoters, PrpsL or Prbc* from ABICyano1.

[0509] The plasmid map of plasmid TK441 is shown in FIG. 15 and its nucleic acid sequence is depicted in SEQ ID NO: 50. The gene coding for ZmPdc is under the transcriptional control of the native PpetJ and a codon improved gene of SynAdh enzyme is controlled by the native PrpsL promoter from ABICyano1. FIG. 52 shows the plasmid map of the plasmid TK480 including the native Pmntc promoter of ABICyano1 controlling the gene coding for ZmPdc and Prbc with an improved RBS controlling the codon improved gene coding for Adh enzyme. FIG. 53 depicts the plasmid map of TK483. This plasmid contains the Cu²⁺ inducible promoter from ORF0221 of Cyanobacterium sp. ABICyano1 coding for a CopA family copper-resistance protein. The adh gene in TK483 is under control of Prbc* with an improved RBS. FIG. 54 depicts a plasmid map of TK487. This plasmid includes the Cu²⁺ inducible promoter from ORF0361 of ABICyano1 directly upstream of ZmPdc and Prbc* with an improved RBS controlling the transcription of a codon improved gene coding for the ADH enzyme with the nucleotide sequence shown in FIG. 52 (nucleotides 2390 to 3406 of SEQ ID NO: 60 whose expressed enzyme is ADH111). The plasmid map of TK488 is depicted in FIG. 55. This construct harbors the native Zn²⁺ inducible PsigH from ABICyano1 for transcriptional control of a codon improved ZmPdc gene and Prbc* for the transcriptional control of the gene coding for ADH with the nucleotide sequence shown in FIG. 52 (nucleotides 2390 to 3406 of SEQ ID NO: 60). The gene encoding ZmPdc is controlled by the Zn²⁺ inducible promoter from the ORF 1542 from Cyanobacterium sp. ABICyano1 in the construct TK489 (FIG. 56). The plasmid map of TK490 is depicted in FIG. 57. In this plasmid the gene coding for ZmPdc is controlled by the Zn²⁺ inducible promoter which controls the transcription of the ORF3126 in Cyanobacterium sp. ABICyano1. The map of plasmid TK504 is depicted in FIG. 58. In TK504 the pdc gene is controlled by the Cu²⁺ inducible Porf0223 and the adh gene FIG. 52 (nucleotides 2390 to 3406 of SEQ ID NO: 60) by Prbc* with an improved RBS.

### Copper-Inducible Strains and Zinc-Inducible Strains

[0510] In an embodiment, non-naturally occurring ABICyano1 organisms containing p6.8 derived vectors with ethanologenic cassettes containing copper-inducible promoters are disclosed that exhibit stable ethanol production for prolonged periods of time. In an embodiment, copper-inducible ABICyano1 ethanologenic strains containing an exogenous adh/pdc cassette enable high and stable PDC activity over time (in contrast to using a PnirA promoter) are disclosed herein.

[0511] In another embodiment, non-naturally occurring ABICyano1 organisms containing p6.8 derived vectors such as a #1770 plasmid containing a zinc inducible PmntC promoter linked to the pdc/adh cassette are disclosed herein. As depicted in FIG. 67, copper-inducible strains such as #1771 (P_{orf0221}), #1772 (P_{orf0316}) and #1774 (P_{orf0223}) as well as a zinc-inducible strain #1770 (P_{mntC}) exhibit a higher ethanol productivity than a nitrate inducible strain TK293 that uses a PnirA promoter. Induction protocols use initial Cu²⁺ addition and also further Cu²⁺ additions. As depicted in FIG. 68, the PDC activity of strains #1770, #1771, #1772 and #1774 were greater than TK293. The strains depicted in FIGS. 67 and 68 were cultivated in a vertical photobioreactor (vPBR) at 200 μE*m⁻²*s⁻¹ in a 12 h/12 day/night cycle.

[0512] As depicted in FIG. 162, the ethanologenic activity of a non-naturally occurring ethanologenic ABICyano1 strain comprising plasmid #1772 with the endogenous copper-inducible promoter Porf0316 was tested with 20×Cu (6 μM Cu²⁺) at a start OD of 2 either grown with ammonia/urea (2 mM each) or nitrate (BG11 recipe) as the sole nitrogen source. Ethanol production was analyzed by GC vial assay. The observed ethanol production rate of 0.00409% (v/v)/h over about 40 hours corresponds to about 32.3 mg/(h*L). The greatest productivity measured was observed in the period from about 5-25 hours of the cultivation experiment having a rate of about 0.00440%(v/v)/h which corresponds to 34.8 mg/(h*L).

[0513] Initial induction with 1.6 μM Cu²⁺ (which is about five times the Cu²⁺ concentration of BG11) in all four treatments of TK487 for ethanol production is depicted in FIG. 69 and for cell growth of TK487, in FIG. 70. TK487 is identical to #1772 (P_{orf0316}), except for a different adh gene. PDC activity in TK487 is depicted in FIG. 71. Ethanol per cell density of induced TK487 is depicted in FIG. 72. In an embodiment, weekly and bi-weekly (day 7 and 21) copper addition results in the highest tested ethanol production and lowest biomass accumulation.

[0514] FIGS. 73 through 76 respectively depict the effect on cell growth. PDC activity, ethanol production, and ethanol production per OD₇₅₀ of releasing copper into solution over a prolonged period of time and at various concentrations of copper to a TK487 strain. In an embodiment, the PDC activity and ethanol production per OD₇₅₀ of TK487 increase with increasing amounts of copper chelated Cu(II) disodium EDTA in the solution and cell growth is inversely related to increasing amounts of copper chelated Cu(II) disodium EDTA in the solution. Not being limited by theory, in contrast to the treatment with free copper, the use of Cu(II) disodium EDTA enables a stable PDC expression and activity without further additions of copper during the course of cultivation.

[0515] FIGS. 77 through 79 depict cross-reactivity of ABICyano1 endogenous copper-inducible promoters P_{orf0221}, P_{orf0316}, and P_{orf0223} in the presence of other divalent metal ions. FIG. 77 depicts the ethanol production over time of an ABICyano1 strain #1771 that has a plasmid containing an ethanologenic cassette encoding for a PDC enzyme that is operably linked to promoter P_{orf0221} while synADH is operably linked to Prbc*(optRBS). As depicted in FIG. 77, P_{orf0221} is induced by copper ion and not by zinc, nickel or cobalt ions. FIG. 78 depicts the ethanol production over time of an ABICyano1 strain #1772 that has a plasmid containing an ethanologenic cassette encoding for a PDC enzyme that is operably linked to promoter P_{orf0316} idle synADH is operably linked to Prbc*(optRBS). As depicted in FIG. 78, P_{orf0316} is induced by copper ion and to a lesser extent by zinc ion, but not by nickel or cobalt ions. FIG. 79 depicts the ethanol production over time of an ABICyano1 strain #1774 that has a plasmid containing an ethanologenic cassette encoding for a PDC enzyme that is operably linked to promoter P_{orf0223} while synADH is operably linked to Prbc*(optRBS). As depicted in FIG. 79, P_{orf0223} is induced by copper ion and not by zinc, nickel or cobalt ions. Thus, in an embodiment, endogenous copper inducible promoters from ABICyano1 exhibit a high selectivity for copper and can be used to control expression of operably linked genes in ABICyano1 by the addition of copper to the medium.

[0516] FIG. 80 depicts the production of ethanol by ethanologenic ABICyano1 strains TK441 and #1769 that contain the promoter PpetJ. Promoter P_{petJ} is inducible by the deprivation of copper. ABICyano1 strains TK441 and #1769 contain an ethanologenic cassette that encodes for ADH and PDC enzymes whose expression is operably linked to P_{petJ}. As depicted in FIG. 80, both ethanologenic ABICyano1 strains TK441 and #1769 produce ethanol in growth media substantially lacking copper ion while producing less ethanol in the presence of 3 μM copper ion. Thus, in an embodiment, promoter P_{petJ} operably linked to an ethanologenic cassette in a non-naturally occurring ABICyano1 organism can be used to control the production of ethanol.

[0517] Table 9 depicts the ethanol production data for various ABICyano1 strains. The third column shows the ethanol production rate as determined by a GC vial online assay. The fourth to sixth column depicts the ethanol production determined for 0.5 L Crison PBR, and for vPBR with different illumination intensities for a period of cultivation of 14 days or 21 days, respectively. These ethanol production data were determined with GC single measurements. The term “vPBR” indicates “vertical photobioreactors”. The following procedure describes the standard lab conditions under which a 1.2 L vPBR is operating as well as the necessary parts, ports, etc. to construct this 1.2 L vPBR. Table 9 depicts a list of plasmids for used for transformation of ABICyano1 with ethanologenic cassettes and also depicts ethanol production in ABICyano1 host cells created thereby.

TABLE 9

| | | EtOH rate GC | | | |
|---|---|---|---|---|---|
| | | vial assay (120 μE | EtOH rate | EtOH rate 1.2 L | EtOH rate 1.2 L |
| | | m−2 s−1) | 0.5 L Crison PBR | vPBR (125 μE m−2 | vPBR (230 μE |
| | | [% (v/v) | (2 × 450 μE m⁻² s⁻¹) | s−1) [% (v/v) | m−2 s−1 [% (v/v |
| | | EtOH/d * OD_{avg.}] | [% (v/v) EtOH/d] | EtOH/d] | EtOH/d] over 14/ |
| Plasmid | Construct | over ca. 48 h | over 14 days | over 14/21 days | 21 days |
| #1578/ | pABICyano1- | 0.0326 | 0.0446 | 0.0149/0.0130 | 0.0196/0.0176 |
| #1646 | 6.8::PnirAzmPdc | | | | |
| #1646 | (opt3)-dsrA- | | | | |
| FIG. 125 | Prbc*(optRBS)- | | | | |
| (SEQ ID | synADH | | | | |
| NO: 75) | (#1578)\oop or | | | | |
| | ADH111 (#1646) | | | | |
| #1658/ | pABICyano1- | 0.0346 | 0.0493 | 0.0161/0.0145 | n.d. |
| #1684 | 6.8::PnirA*2 | | | | |
| #1658 | zmPdc(opt3)- | | | | |
| FIG. 118 | dsrA- | | | | |
| (SEQ ID | Prbc*(optRBS)- | | | | |
| NO: 72) | synADH | | | | |
| | (#1658)\oop or | | | | |
| | ADH111(#1684) | | | | |
| #1663 | pABICyano1- | 0.0366 | 0.0443 | 0.0150/0.0120 | n.d. |
| #1663 | 6.8::PnirA*4 | | | | |
| FIG. 119 | zmPdc(opt3)- | | | | |
| (SEQ ID | dsrA- | | | | |
| NO: 73) | Prbc*(optRBS)- | | | | |
| | synADH\oop | | | | |
| #1697/ | pABICyano1- | 0.0339 | 0.0377 | 0.0139/0.0117 | n.d. |
| #1665 | 6.8::PnirA*3 | | | | |
| #1697 | zmPdc(opt3)- | | | | |
| FIG. 120 | dsrA- | | | | |
| (SEQ ID | Prbc*(optRBS)- | | | | |
| NO: 74) | synADH | | | | |
| | (#1697)\oop or | | | | |
| | ADH111 (#1665) | | | | |
| TK480/# | pABICyano1- | 0.0216 | n.d. | 0.0097/0.0105 | 0.0170/0.0143 |
| 1770 | 6.8::PmntC | | | | |
| | zmPDC(opt1)dsrA- | | | | |
| | Prbc*(optRBS)- | | | | |
| | ADH111 (TK480) | | | | |
| | or Synechocystis | | | | |
| | ADH (#1770) | | | | |
| TK483/# | pABICyano1- | 0.0305 | 0.0286 | 0.0104/0.0115 | 0.0166/0.0140 |
| 1771 | 6.8::Porf0221- | | | | |
| | zmPDC(opt1)dsrA- | | | | |
| | Prbc*(optRBS)- | | | | |
| | ADH111 (TK483) | | | | |
| | or Synechocystis | | | | |
| | ADH (#1771) | | | | |
| TK487/# | pABICyano1- | 0.0323 | 0.0300 | 0.0150/0.0120 | 0.0205/0.0161 |
| 1772 | 6.8::Porf0316- | | | | |
| | zmPDC(opt1)dsrA- | | | | |
| | Prbc*(optRBS)- | | | | |
| | ADH111 (TK487) | | | | |
| | or Synechocystis | | | | |
| | ADH (#1772) | | | | |
| TK490/# | pABICyano1- | 0.0329 | n.d. | n.d. | n.d. |
| 1773 | 6.8::Porf3126- | | | | |
| | zmPDC(opt1)dsrA- | | | | |
| | Prbc*(optRBS)- | | | | |
| | ADH111 (TK490) | | | | |
| | or Synechocystis | | | | |
| | ADH (#1773) | | | | |
| TK504/# | pABICyano1- | 0.0333 | 0.0307 | n.d. | 0.0172/0.0148 |
| 1774 | 6.8::Porf0223- | | | | |
| | zmPDC(opt1)dsrA- | | | | |
| | Prbc*(optRBS)- | | | | |
| | ADH111 (TK504) | | | | |
| | or Synechocystis | | | | |
| | ADH (#1774) | | | | |

[0518] In another embodiment, genetically enhanced Cyanobacterium sp. ABICyano1 strains including extrachromosomal plasmids all containing a pdc gene under the transcriptional control of either the native nirA promoter or modified variants thereof, were cultured in 0.5 L photobioreactors. These strains included the plasmids #1606, #1629 and #1636. FIG. 28 depicts the ethanol production normalized to the growth (OD₇₅₀ₙₘ) determined by GC single measurements for ABICyano1 strains transformed with the plasmids #1606 (pdc gene under the control of the native PnirA), plasmid #162 (pdc gene under the control of a modified variant of PnirA with changes in the RBS) and plasmid #1636 (pdc gene under the control of a modified variant of PnirA with changes in the operator sequence and the TATA box) for a period of time of at least 20 days after induction was realized by transition of the pre-culture to usual mBG11 medium (containing nitrate for induction) at the beginning of the cultivation experiment. The graph depicts that the normalized ethanol production is higher for the strains including the plasmids with the Modified promoters. FIGS. 29 and 30 depict the specific activity of PDC and ADH during the course of the above mentioned cultivation. As depicted in FIGS. 29 and 30 the inducible modified nirA promoter variants PnirA*2 (#1629) and PnirA*3 (#1636) result in a higher activity of PDC enzyme compared to the native promoter (#1606).

[0519] FIG. 31 depicts the ethanol production normalized to the growth (OD₇₅₀ₙₘ) determined by the GC single measurement method for ABICyano1 strains transformed with the plasmids #1606 (pdc gene under the control of the native PnirA), plasmid #1631 (pdc gene under the control of a modified PcorT with modifications in the TATA box) and plasmid #1632 (pdc gene under the control of a modified PcorT with modifications in the TATA box and the RBS) for a period of time of at least 20 days cultured in 0.5 L photobioreactors. The ethanol production of the strain transformed with the plasmid containing the native PnirA with gene is comparable to the ethanol production of the strain containing the plasmid with the pdc gene controlled by the modified corT promoter variants PcorT*3 (#1632) with modifications in the TATA box and RBS, whereas the ethanol production of the strain containing the plasmid with PcorT with modifications only in the TATA box PcorT*2 (#1631) exhibits a lower ethanol production rate, especially in the time period starting from the tenth day of cultivation on.

[0520] FIGS. 32 and 33 depict the specific activity of PDC enzyme and ADH enzyme during the course of the above mentioned cultivation. The strains with the native PnirA as well as the PcorT*3 comprising modifications in the TATA box and the RBS show higher reactivity of PDC enzyme than the other strain.

[0521] FIGS. 40 to 42 depict the ethanol production rates of the ABICyano1 strains transformed with the plasmids #1635, #1639 and #1640 including the native PsmtA promoter from Synechococcus PCC 7002 as well as modified versions of PsmtA. It can clearly be seen that all promoters are repressed in the absence of Zn²⁺ and can be induced upon addition of Zn²⁺.

[0522] FIG. 81 depicts the activity of Pdc enzyme in the uninduced state and after 72 hours of induction for ABICyano1 strains transformed with the plasmids #1578, #1701, #1658, #1697 and #1663, including an unmodified endogenous nirA promoter (plasmid #1578), and four different modified nirA promoter variants PnirA*1 (plasmid #1701). PnirA*2 (plasmid #1658), PnirA*3 (plasmid #1697) and PnirA*4 (plasmid #1663). Cultivation of those ethanologenic hybrids was performed in GC vials for 72 hours. The Pdc activity after induction is indicated by the blue bars whereas the much lower activity of Pdc enzyme in the repressed state is given by the red bars. The induction factors for these plasmids #1578, #1701, #1658, #1697 and #1663 are 12, 10, 14, 8, and 7 times the PDC activity in the induced state vs. the repressed state. This figure depicts that specific nucleotide changes introduced into the ribosomal binding site and/or the promoter region of the nirA promoter in the respective variants PnirA*1, PnirA*2, PnirA*3 and PnirA*4 increased the expression level of the PDC in the induced state, but had relatively little impact on the tightness of the modified promoter in the repressed state.

[0523] FIGS. 82 and 83 depict the activity of PDC and their respective OD₇₅₀ₙₘ-normalized ethanol production (% EtOH per OD₇₅₀ₙₘ) during the course of a 29 day cultivation grown at 125 μE*m⁻²*s⁻¹ in a 12 h/12 day/night cycle for the above mentioned strains of FIG. 81 except for #1701 which was omitted. The PDC activity of #1697 (PnirA*3) and #1663 (PnirA*4) is higher and more stable over time than that of #1578 (PnirA) and #1658 (PnirA*2). Therefore the ratio of carbon distribution into ethanol and biomass (EtOH/OD ratio) is thereby higher and appears to be more stable over time for the transformants. FIGS. 84 and 85 depict the OD₇₅₀ₙₘ, and the ethanol production in % (v/v) of this about 30 day cultivation grown at 125 μE*m⁻²*s⁻¹ in 12 h/12 day/night cycle. The plasmid maps as well as the nucleic acid sequences of these plasmids have already been described above.

[0524] In an embodiment, higher C-branching (EtOH/OD ratio) for the strains transformed with plasmids #1697 (PnirA*3) and #1663 (PnirA*4) is related to the reduced growth compared to ABICyano1 strains transformed with plasmids #1578 (PnirA) and #1658 (PnirA*2), that show a similar ethanol production rate over about 29 days. Strains with a higher carbon branching ratio and thus reduced growth rate will enter the “light limited” growth phase later enabling a longer duration of high ethanol production. Delayed growth will extend the phase of “unlimited resources” for high ethanol yields (less cell aging effects, lower accumulation of inhibitory substance and lower respiration demand due to lower cell density).

Strains with Higher ADH Activity

[0525] High activity of synADH is accompanied with elevated PDC activity. Without being bound by theory, this is thought to occur because of reduced acetaldehyde exposure prevents PDC inactivation by reduced enzyme adduct formation with acetaldehyde (and/or other unknown inhibitory effects). Thus, in an embodiment, strains with increased expression of ADH from an adh cassette also have increased ethanol production even in the presence of high ethanol concentrations. In another embodiment, a method to reduce acetaldehyde exposure is disclosed that uses an increased amount of ADH that may work by stabilizing PDC activity over time.

[0526] FIG. 86 depicts ADH and PDC activity in TK293, #1578 and #1792. FIG. 87 depicts total ethanol production in TK293, 1578 and 1792. FIG. 88 depicts ethanol production per OD₇₅₀ in TK293, #1578 and #1792. TK293 is pABICyano1-6.8::PnirA-zmPDC(opt1)-PipsL-synADH(opt1)_ter; #1578 is pABICyano1-6.8::PnirA-zmPDC(opt3)dsrA-Prbc*(optRBS)-synADH_oop; #1749 is pABICyano1-6.8::PnirA-zmPDC(opt3)dsrA-PrpsL*4-synADH_oop (SEQ ID NO: 80) having a plasmid map depicted in FIG. 130 and #1792 is pABICyano1-6.8::PnirA-zmPDC(opt3)dsrA-PcpcB-syhADH_TrbcS.

[0527] Plasmid #1792 results in improved synADH expression and shows better and more stable ethanol production under standard conditions. As depicted in FIGS. 89-91, increased ADH activity prevents PDC inactivation. FIG. 89 depicts acetaldehyde accumulation of TK293, #1578, #1749, and #1792. FIG. 90 depicts ADH activity in TK293, #1578, #1749, and #1792. Conversely, acetaldehyde exposure during cultivation reduces PDC activity. Thus, there is an inverse relationship between ADH activity and acetaldehyde accumulation for different synADH expressing strains in GC vial assay. FIG. 91 depicts specific PDC activity in varying amounts of acetaldehyde added to the cells. Acetaldehyde is completely converted into ethanol by the cells within 1-2 hours.

[0528] Higher ADH activity helps to prevent PDC inactivation. A decrease in PDC activity was detected for several strains with very low ADH activity (in spite of identical PDC cassettes). FIG. 92 depicts ADH activity and FIG. 93 depicts PDC activity with or without the addition of acetaldehye (3 mM and incubation for 5 hours) for strains TK293, #1578, #1749, and #1792 each having different ADH activity levels.

[0529] In an embodiment, ABICyano1 ethanologenic pdc/adh cassettes use different adh genes encoding ADH enzymes from different organisms, including, but not limited to, ADH 111 (Lyngbya), ADH1520 (Microcystis), ADH553 (Cyanothece) and ADH242 (Arthrospira), ADH916 (Synechococcus) and ADH1102 (Croococcidiopsis). As an example, pdc/adh cassettes useful for extended production of ethanol in a ABICyano1 host cell include #1792 (pABICyano1-6.8::PnirA-zmPDC(opt3)_dstA-PcpcB-synADH_TrbcS); #1791 (pABICyano1-6.8::PnirA-zmPDC(opt3)_dsrA-PcpcB-ADH111(opt)_TrbcS); #1793 (pABICyano1-6.8::PnirA-zmPDC(opt3)_dsrA-PcpcB-ADH916(opt)_TrbcS); #1794(pABICyano1-6.8::PnirA-zmPDC(opt3)_dsrA-PcpcB-ADH1520(opt)_TrbcS); #1795 (pABICyano1-6.8::PnirA-zmPDC(opt3)_dsrA-PcpcB-ADH553(opt)_TrbcS) and #1749 (pABICyano1-6.8::PnirA-zmPDC(opt3)_dsrA-PrpsL*4-synADH_oop).

[0530] In another embodiment, the expression of heterologous adh genes from other cyanobacterial species that have been improved for codon usage patterns in ABICyano1 resulted in increased ADH activity. FIG. 94 depicts ADH activity of various expressed adh genes, some of which were codon improved for expression in ABICyano1. ADH242 is derived from Arthrospira platensis and ADH111 is derived from Lyngbya species. Constructs #1646 and #1754 (pABIcyano1-PnirA-zmPDC(opt1)-dsrA-Prbc*(optRBS)-ADH242(opt)_ter) (SEQ ID NO: 78) whose plasmid map with annotation is depicted in FIG. 128, had codon improved adh genes for ADH111 and ADH242, respectively. As depicted in FIG. 94, codon improvement for expression in ABICyano1 for the genes encoding for ADH111 and ADH242 resulted in an increase in ADH activity by about 30% to about 50%. FIG. 129 depicts a plasmid map with sequence annotation of plasmid #1735 (pABIcyano1-PnirA-zmPDC(opt1)_dsrA-Prbc*(optRBS)-Adh1694_ter) (SEQ ID NO: 79).

[0531] In another embodiment, increased ADH activity results in resistance to decreased ethanol production resulting from higher ethanol concentrations in the growth media. FIG. 95 depicts the effect of ethanol productivity of various ethanologenic ABICyano1 strains in growth media containing 1% vol/vol ethanol. As depicted in FIG. 95, the difference between the production rate of ethanol in growth media containing no added ethanol and growth media containing 1% added ethanol is less when the expression of ADH is higher. FIG. 95 depicts the daily ethanol production rate in percent vol/vol per day over 10 days as measured from ABICyano1 strains illuminated with 450 μE*m⁻²*s⁻¹ (from two sides each) in 12 h/12 day/night cycles. As is depicted in FIG. 95, the stronger the ADH activity the less the impact of higher ethanol concentrations on ethanol production. As depicted in FIG. 95, ABICyano1 strain #1803 (plasmid map depicted in FIG. 137) (pABIcyano1-PnirA-zmPDC(opt1)\dsrA-PcpcB-Adh1520_ter) (SEQ ID NO: 87) that expresses ADH from Microcystis aeruginosa operably linked to the cpcB promoter exhibits less of a decrease in ethanol productivity (7% less) in a 1 ethanol growth solution when compared to the decrease in ethanol productivity of strain #1792 expressing ADH from Synechocystis PCC 6803 operably linked to the cpcB promoter (17% less).

[0532] In an embodiment, ethanol production from ABICyano1 strains each containing a different adh gene operably linked to an endogenous ABICyano1 cpcB promoter and each strain containing a nirA promoter operably linked to pdc expression is depicted in FIG. 96, FIG. 96 also depicts the production of ethanol from strain TK293 (p171-6.8_PnirA-zmPDC(opt1)-PrpsL-synADH(opt1)_ter). Each strain depicted in FIG. 96 was cultivated in a vPBR system with exposure to light at 230 μE*m-2*s-1 (from one side) in a 12 h/12 day/night cycle. As depicted in FIG. 96, the ethanol production of ABICyano1 strains #1790, #1791, #1792, #1793, #1794, and #1795 was greater than that of TK293 after about day 10 to about day 31 of growth. ABICyano1 strain #1790 (SEQ ID NO: 81) has a plasmid map with annotations as depicted in FIG. 131. ABICyano1 strain #1791 (SEQ ID NO: 82) has a plasmid map with annotations as depicted in FIG. 132. ABICyano1 strain #1792 (SEQ ID NO: 83) has a plasmid map with annotations as depicted in FIG. 133. ABICyano1 strain #1793 (SEQ ID NO: 84) has a plasmid map with annotations as depicted in FIG. 134. ABICyano1 strain #1794 (SEQ ID NO: 85) has a plasmid map with annotations as depicted in FIG. 135. ABICyano1 strain #1795 (SEQ ID NO: 86) has a plasmid map with annotations as depicted in FIG. 136.

### Dual Inducible PDC Genes

[0533] In an embodiment, ABICyano1 host cells are transformed with ethanologenic vectors that contain more than one pdc gene. Induction of a second pdc gene increases PDC activity by about 2.5 times when compared to the induction of only a single pdc gene. Induction of a more than one pdc gene results in an increase in ethanol production and a decrease in cell growth. Thus ethanol production per OD₇₅₀ is higher for #1743 when both pdc genes are active. FIG. 97 depicts the PDC activity in strain #1743 with and without induction by 6 μM copper at about day 16 and the additional induction with 5 μM copper at about day 30. FIG. 98 depicts the total ethanol production of strain #1743 with and without the induction by copper. FIG. 99 depicts total ethanol per cell density measured at OD₇₅₀.

[0534] In an embodiment, dual pdc genes are introduced into an ABICyano1 host cell either on an integrative plasmid or on a replicative plasmid. Thus, the dual pdc genes, and other components of the ethanologenic cassette, can be integrated into the genome of ABICyano1 and/or exist on an extra-chromosomal plasmid within the ABICyano1 host cell. Strain #1743 is an ABICyano1 host cell containing a recombinant plasmid pABICyano1-6.8::PnirA-zmPDC171(opt3)_dsrA-Prbc*(optRBS)-synADHoop*-Porf0221-zmPDC(opt1)dsrA. Strain #1743 has two independently inducible pdc copies where one pdc gene is inducible by nitrate and the other pdc gene is inducible by copper. Strain #1743 was analyzed for PDC activity in comparison to the corresponding single pdc strains #1578 (pdc under control of promoter PnirA) and #1771 (pdc under control of promoter Porf0221). The analyses revealed independently inducible expression of both pdc genes from one construct. Without nitrate and copper addition, the pdc genes of strain #1743 were as tightly repressed as the single pdc strains #1578 and #1771. Long-term cultivation experiments using a copper inducible pdc construct resulted in increased PDC expression when compared to other inducible pdc constructs such as nitrate inducible pdc constructs.

[0535] The second pdc gene of strain #1743 was induced at day 16 of cultivation in a photobioreactor (at an OD₇₅₀ of about 5.5) by addition of Cu²⁺. Strain #1744 comprising plasmid #1744 (FIG. 161) (pABIcyano1-PnirA-zmPDC(opt3)-dsrA-Prbc*(optRBS)-synADH\oop-Porf3126-zmPDC(opt1)\dsrA) (SEQ ID NO: 111) having two pdc genes under control of PnirA and Porf3126 (Zn²⁺) was also induced at day 16 of cultivation in a photobioreactor (at an OD₇₅₀ of about 5.5). The PDC activity in each strain increased to a value of about 5-6 μmol/mg*min in comparison to a value of about 2.5 μmol/mg*min for the control replicates without copper addition. Ethanol production increased about 10-15% at day 37 of cultivation. Additionally, the ethanol to OD₇₅₀ ratio increased.

[0536] In an embodiment, the growth of strain #1743 containing two pdc genes, one pdc gene operably linked to a nirA promoter and a second pdc gene operably linked to the endogenous copper-inducible promoter Porf0221, is analyzed by measuring absorption at OD₇₅₀ of the growth media after induction of the copper-inducible promoter Porf0221. As depicted in FIG. 100, cells were grown for 135 days and the addition of copper at day 48, 78 and at about day 106 caused a slight decrease in the rate of growth of ABICyano1 strain #1743 when compared to the control lacking copper in the growth media. As depicted in FIG. 100, a 1:12 dilution or a 1:16 dilution of the cultures is indicated by the thin arrows, the thick arrow depicts the first detection of revertants not having n first pdc gene expressing PDC enzyme.

[0537] As depicted in FIG. 101, the production of ethanol from strain #1743 was measured in the same growth media as depicted in the OD₇₅₀ measurements of FIG. 100. In an embodiment, as depicted in FIG. 101, the overall ethanol production increased when copper was added to the growth media at days 48, 78 and 106. In another embodiment. PDC activity from strain #1743 was measured over about 135 days of growth. As depicted in FIG. 101, a 1:12 dilution or a 1:16 dilution of the cultures is indicated by the thin arrows, the thick arrow depicts the first detection of revertants not having n first pdc gene expressing PDC enzyme.

[0538] FIG. 102 depicts the PDC activity in ABICyano1 strain #1743 cells from growth media over the course of about 135 days. The growth media was diluted at about days 48, 78 and 106 of growth. In another embodiment, the total ethanol produced per cell density was measured. As depicted in FIG. 102, a 1:12 dilution or a 1:16 dilution of the cultures is indicated by the thin arrows, the thick arrow depicts the first detection of revertants not having n first pdc gene expressing PDC enzyme.

[0539] As depicted in FIG. 103, strain #1743 was grown for about 135 days and was diluted at about days 48, 78 and 106 of growth and amount of ethanol in percent volume per volume per OD₇₅₀ was measured. As depicted in FIG. 103 the induction of the pdc gene by introduction of copper into the growth media results in an increase in the amount of ethanol produced per OD₇₅₀ of ABICyano1 strain #1743 when compared to the ABICyano1 strain #1743 grown in media lacking copper. As depicted in FIG. 103, a 1:12 dilution or a 1:16 dilution of the cultures is indicated by the thin arrows, the thick arrow depicts the first detection of revertants not having n first pdc gene expressing PDC enzyme. As depicted in FIG. 103, the fat red arrow indicates the detection of first revertants (at about day 90). The top and bottom arrows on the far rights of FIG. 103 indicate the trend of carbon-partitioning (EtOH/OD) with and without copper addition respectively. With an increasing number of revertants, a decrease in carbon-partitioning towards ethanol is detectable. This decrease in carbon-partitioning towards ethanol can be compensated by activation of the second pdc copy (+Cu²⁺), after which the EtOH/OD ratio remains about constant.

[0540] In another embodiment, and as depicted in FIG. 163, the PDC activity of strains #1578, #1743 and #1744 were tested with and without induction by nitrate and copper (#1578 and #1743) and with and without induction by nitrate and zinc (#1744). Strains #1743 (pABICyano1-6.8::PnirA-zmPDC(opt3)dsrA-Prbc*(optRBS)-synADH_oop-Porf0221-zmPDC(opt1)dsrA) and #1744 (pABICyano1-6.8::PnirA-zmPDC(opt3)dsrA-Prbc*(optRBS)-synADH_oop-Porf3126-zmPDC(opt1)dsrA) have two pdc copies on the pABIcyano1-6.8kb plasmid under control of different promoters (inducible either by NO₃⁻/Cu²⁺ or NO₃⁻/Zn²⁺), both show functional and independent inducible expression of both pdc genes. As depicted in FIG. 163, PDC activity was measured about 48 h after induction. ABICyano1 strain #1578 (pABICyano1-6.8::PnirA-zmPDC(opt3)dsrA-Prbc*(optRBS)-synADH_oop) lacks a second pdc gene on the ethanologenic cassette. The second pdc gene can be turned on when the PDC activity from the first pdc gene is declining (due to decrease in promoter activity and/or PDC inactivation by genetic instability). Thus. PDC activity can be both maintained longer and at a higher rate in ABICyano1 strains comprising, more than one pdc gene.

### Homologous Recombination in ABICyano1

[0541] In an embodiment, homologous recombination is used to introduce genes into ABICyano1 host cells. An ethanologenic gene cassette was successfully incorporated into the chromosome of ABICyano1 by using homologous recombination. FIG. 104 depicts the results of various homologous recombination (HR) events in ABICyano1. Different antibiotic resistance markers were introduced into the genome of ABICyano1 by using homologous recombination including GmR and KmR. The results of homologous recombination experiments in ABICyano1 host cells are depicted in FIG. 104. The single to double crossover ratio is about 10:1 using 2 kb homology arms. The use of 3 kb flanking regions for HR increases the frequency of double crossover events.

[0542] In an embodiment, transformation of Cyanobacterium sp. ABICyano1 with integrative plasmids which can integrate into the chromosomal DNA can be done in the same way as the transformation with extrachromosomal, self-replicating plasmids as disclosed herein. In an embodiment, the oriVT present in the integrative plasmids described in the following is only necessary for propagation of the plasmids in E. coli and for conjugative transfer into Cyanobacterium sp. ABICyano1. These integrative plasmids cannot replicate in Cyanobacterium sp., in particular in ABICyano1.

[0543] In an embodiment, integration of target genes into the genome of ABICyano1 will be conducted with the help of plasmid TK471 (pABICyano1::pilT-PrbcLABICyano1_Km**pilC-sacB-oriVT) whose plasmid map is depicted in FIG. 105 (SEQ ID NO: 67), which was generated to integrate a kanamycin resistance gene in the pilT/pilC region, resulting in a pilT/pilC minus strain. The TK180 based plasmid contains a pilT flanking region of ABICyano1 upstream as well as a pilC flanking region of ABICyano1 downstream of the kanamycin resistance gene to generate a double crossover event in ABICyano1. Moreover, sacB from Bacillus subtilis is encoded on TK471. Expression of sacB in grain negative bacteria grown on media supplemented with sucrose is toxic for the bacteria. Hence, only the bacteria which lose the sacB gene are able to grow on sucrose plates. ABICyano1 TK471 strains grown on sucrose/kanamycin plates are therefore forced to induce homologous recombination to flip the kanamycin resistance gene into the genome and to lose the plasmid TK471 due to the presence of the sacB gene. In order to integrate the EtOH cassette into the genome, plasmid TK471 will be modified carrying the EtOH cassette adjacent to the Km gene (also within the pilT and pilC flanking region).

[0544] Integration of target genes into the genome of ABICyano1 was conducted with the help of plasmid TK541 (oriVT_flv3-up_PrbcL-Gm**_flv3-down) whose plasmid map is depicted in FIG. 106 (SEQ ID NO: 68), which was generated to integrate a gentamycin resistance gene into orf2849 (flv3). The oriVT based plasmid TK541 contains a flanking region of orf2849 of ABICyano1 upstream as well as a flanking region of orf2849 of ABICyano1 downstream of the gentamycin resistance gene to generate a double crossover event in ABICyano1 in order to insert the sequence between both flanking regions of orf2849 into the genome of ABICyano1 via homologous recombination.

[0545] FIG. 107 depicts a DNA agarose gel of a PCR reaction using two PCR primers including one primer specific for the gentamycin resistance gene and the other primer binding within the genome of ABICyano1. This PCR was performed in order to identify the integration of the gentamycin resistance gene into the genome of Cyanobacterium sp. ABICyano1 via transformation with the above mentioned plasmid TK541. The line marked with “M” denotes the marker. Lanes 1 and 2 show PCR signals using two different clones of Cyanobacterium sp. ABICyano1 transformed with the plasmid TK541, whereas lanes 3 and 4 are PCR reactions using and analyzing the untransformed wild-type of Cyanobacterium sp. ABICyano1 and E. coli containing plasmid TK541, respectively (negative control). It can clearly be seen that only lanes 1 and 2 give a PCR signal thereby evidencing the integration of the gentamycin resistance gene into the genome. The integration shown on the DNA agarose gel of FIG. 107 relates to a single cross-over integration where only one flanking region of orf2849 (flv3) is involved, but not the other one. This results in an integration of the antibiotic resistance conferring gentamycin cassette of TK541 into the genome of ABICyano1 without excision of parts of the chromosome of ABICyano1. The recombination frequency for a double crossover involving both flanking regions of orf2849 is lower than for a single cross over recombination so that a double crossover event with plasmid TK541 could also have been identified if more transformants were screened.

[0546] An additional plasmid, TK554 (4oriVTflv3-upPorf0223ABICyano1-zmPDCABICyano1(opt)dsrA-Prbc*(optRBS)-ADH111(ABICyano1)Prbd_Gm**flv3-down) whose plasmid map is depicted in FIG. 108 (SEQ ID NO: 69) was constructed which is a derivative of TK541 and which includes an ethanologenic cassette in addition to the antibiotic resistance conferring gentamycin cassette. This plasmid will be used in order to introduce recombinant genes involved in ethanol production into the genome of ABICyano1 via homologous recombination in the same way as for TK541.

[0547] Another integrative plasmid TK552 (oriVT_flv3-up_PcpcBABICyano1-Gm**_flv3-down) whose plasmid map is depicted in FIG. 109 (SEQ ID NO: 70) was constructed which in comparison to the plasmids TK541 and TK554 contains a different promoter. PcpcB, for the gentamycin gene. This promoter is also an endogenous promoter of ABICyano1. For this plasmid integration into the genome of ABICyano1 was shown via a double cross-over homologous recombination event, thereby resulting in the excision of a genomic region of the chromosome of ABICyano1 which is located between both flanking regions flv3up and flv3down (see FIG. 110). FIG. 110 shows in lane “1” and “2” a PCR reaction performed with primers specific for the gene flv3. Lane 2 corresponding to the ABICyano1 strain transformed with TK552 shows that the gene flv3 was deleted, whereas a clear signal of flv3 can be detected in lane “1” corresponding to the wild type ABICyano1. The lane denoted with “M” is a marker. Therefore the integrative plasmids can also be used in order to delete genomic regions of ABICyano1 by integrating a recombinant gene into its genome. This strategy can for example be used in order to provide targeted knock outs or gene disruptions of endogenous genes of Cyanobacterium sp., in particular ABICyano1 and at the time integrating at least one recombinant gene into the genome.

[0548] In another embodiment, plasmid TK540 (oriVT_pilT-up_PrbcL-Gm**_pilC-down) whose plasmid map is depicted in FIG. 111 (SEQ ID NO: 71) was constructed, which can integrate into a different locus pilT/pilC in comparison to the plasmids TK541, TK552, and TK554. As depicted in FIG. 112, a 0.8% DNA agarose gel depicts analysis for single and double cross over integration of this plasmid into the genome of Lanes 1 to 4 show the PCR analysis for a potential double cross-over event in the pilT/pilC region with primers specific for regions outside the pilT/pilC region. These primers give a positive signal for ABICyano wild-type and would give a small PCR product if a double cross-over integration took place. Lane 1 shows the lack of a double cross-over PCR signal for pilT/pilC for ABICyano1 transformed with TK540. Lane 2 depicts the expected wild-type ABICyano1 band and lane 3 shows the lack of a PCR signal for E. coli containing plasmid TK540 as a negative control. Lane 4 shows the PCR reaction using H₂O instead of DNA (technical negative control). Lanes 5 to 8 depict the detection of single crossover integration into the pilT upstream region with lane 5 showing the PCR signal for ABICyano1 transformed with TK540. Lane 6 again depicts the wild type ABICyano1 and lane 7 shows the lack of a PCR signal for E. coli containing plasmid TK540. Lane 8 shows a PCR reaction with H₂O. Lanes 9 to 12 depict the detection of a single crossover integration into the downstream region of pilC with lane 9 presenting no PCR signal for ABICyano1 transformed with TK540, and lane 10 showing the wild type ABICyano1. Lane 11 shows background PCR signals for E. coli containing plasmid TK540 and lane 12 is a negative control PCR reaction with water. M denotes the marker.

[0549] In an embodiment, plasmids for chromosomal integration in the ABICyano1 genome at the pilTC locus were constructed. The plasmids used optimized P_{nirA} promoters P_{nirA*2}, P_{nirA*3}, P_{nirA*4}, and P_{orf316} driven PDC(opt1) along with a P_{epcB}-synADH cassette. The plasmids used KmR, GmR and CmR marker genes. As depicted in FIG. 113, strains used for transformation included #1817 (SEQ ID NO: 107) (pflv3::PnirA-zmPDC(opt1)_dsrA-Prbc*(optRBS)-synADH\oop-PrbcL-Gm**) whose plasmid map is depicted in FIG. 157, and #1818 (SEQ ID NO: 108) (flv3::P_{orf0316}-zmPDC(opt1)_dsrA-P_{rbc*}(optRBS)-synADH_oop-P_{rbcL}-Gm**) whose plasmid map is depicted in FIG. 158, both of which already would have one PDC/ADH cassette in the cromosome in the flv3 locus.

[0550] FIG. 113 depicts the results of various HR experiments including particular gene knockouts in the genome of ABICyano1 as well as various gene introductions into the genome of ABICyano1 host cells by HR. Knockouts created by HR include ΔnarB, ΔargH, and ΔleuB. Gene introductions include P_{mirA}-pdc/adh, P_{orf0316}-pdc/adh, and promoters used variously include PrbcL and/or PcpcB for expression of the Gm resistance. In an example, nirA and adhE genes are knocked out by HR in ABICyano1.

[0551] In an embodiment, chromosomal integrative plasmids were used to integrate a marker gene into the chromosome of ABICyano1 at the flv3 gene. As depicted in FIG. 114, PCR-based segregation analysis shows that an ABICyano1 organism transformed with construct TK552 (pOriVT_flv3-up_PcpcB-Gm**flv3-down) successfully integrated an antibiotic resistance marker gene (Gm**) into to the flv3 gene in the chromosome of ABICyano1. FIG. 114 also depicts various stages of segregating the cell populations having the marker integrated into only some of the population of transformed ABICyano1 cells and populations having the marker integrated into all of the population of transformed ABICyano1 cells. As depicted in FIG. 114, ABICyano1 clone TK552.5 is completely segregated whereas ABICyano1 clone TK552.8 is only partially segregated (about 80%).

[0552] In another embodiment, chromosomal integrative plasmids were used to integrate a GmRmarker gene into the chromosome of ABICyano1 at the ycf37 gene. As depicted in FIG. 115, PCR-based segregation analysis shows that an ABICyano1 organism transformed with construct TK616 (pOriVT_ycf37-up_FRT-PcpcB-Gm^{**}-ter-FRT_ycf37-down) successfully integrated an antibiotic resistance marker gene (Gm**) into to the ycf37 gene in the chromosome of ABICyano1. FIG. 115 also depicts various stages of segregating the cell populations having the marker integrated into only some of the population of transformed ABICyano1 cells and populations having the marker integrated into all of the population of transformed ABICyano1 cells. As depicted in FIG. 115, ABICyano1 clone TK616.5 is completely segregated whereas ABICyano1 clone TK616.4 is only partially segregated (about 80%).

[0553] In an embodiment, chromosomal integration of a construct resulted in the creation of an ABICyano1 strain auxotrophic for arginine. Chromosomal integrative plasmids were used to integrate a marker gene into the chromosome of ABICyano1 at the argH gene. As depicted in FIG. 116, PCR-based segregation analysis shows that an ABICyano1 organism transformed with construct TK597 (pOriVT_argH-up_FRT-PcpcB-Gm**-ter-FRT_argH-down) successfully integrated an antibiotic resistance marker gene (Gm**) into to the argH gene in the chromosome of ABICyano1. As depicted in FIG. 116 the auxotrophy for arginine of the ABICyano1TK597 strains was tested by growing on a BG11 agarose plate lacking arginine. As depicted in FIG. 116, all of the auxotrophic clones cannot grow on the BG11 agarose plate lacking arginine whereas the wild-type ABICyano1 can grow.

[0554] In an embodiment, chromosomal integration of ethanologenic constructs into the chromosome of ABICyano1 resulted in ABICyano1 strains that produced ethanol. As depicted in FIG. 117 plasmids #1817, #1818, #1819, and #1820 were introduced into ABICyano1 host cells and chromosomal integration occurred via homologous recombination. The plasmid map of #1819 (pflv3::PnirA-zmPDC(opt1)_dsrA-Prbc*(optRBS)-synADH\oop-PcpcB-Gm**) (SEQ ID NO: 109) is depicted in FIG. 159. Then plasmid map of #1820 (pflv3::Porf0316-zmPDC(opt1)_dsrA-Prbc*(optRBS)-synADH\oop-PcpcB-Gm**) (SEQ ID NO: 110) is depicted in FIG. 160. Strains resulting from the integration events contained an exogenous ethanologenic cassette having an adh gene operably linked to a constitutive promoter Prbc*(optRBS) and having a pdc gene operably linked to either a nitrate inducible promoter PnirA (#1817 and #1819) or a copper inducible promoter Porf0316 (#1818 and #1820).

[0555] In an embodiment, a knockout of an ABICyano1 homolog of a recJ gene in is disclosed to increase the efficiency of homologous recombination in ABICyano1. In Synechocystis sp. PCC 6803 deletion of sll1354 (encoding for ssDNA-specific exonuclease recJ) increased the transformability with suicide constructs by two orders of magnitude (Kufryk et al., 2001). The gene sll1354 encodes for a 759 aa enzyme that is homologous to two RecJ proteins in ABICyano1. A first RecJ homolog is 30% identical to sll1354 and is 575 as (SEQ ID NO: 125) encoded by orf0488 is (SEQ ID NO: 127). A second RecJ homolog is 25% identical to sll1354 and is 800 as (SEQ ID NO: 126) encoded by orf2384 (SEQ ID NO: 128). In an embodiment, HR is improved in ABICyano1 by the deletion of orf0488 and/or orf2384. A knockout of orf2384 (“recJ2”) from the genome of ABICyano1 was successful and is embodied in construct TK567.

[0556] In an embodiment, an integrative plasmid is TK539 (oriVT_flv3_up_PrbcL-Km**_flv3_down), the plasmid map with annotation is depicted in FIG. 138 and sequence depicted in SEQ ID NO: 88.

[0557] In an embodiment, an integrative plasmid is TK541 (oriVT_flv3_up_PrbcL-Gm**_flv3_down) the plasmid map with annotation is depicted in FIG. 139 and sequence depicted in SEQ ID NO: 89.

[0558] In an embodiment, an integrative plasmid is TK552 (oriVT_flv3_up_PcpcB-Gm**_flv3_down) the plasmid map with annotation is depicted in FIG. 140 and sequence is depicted in SEQ ID NO: 90.

[0559] In another embodiment, an integrative plasmid is TK617 (oriVT_flv3_up_{—}1kb_FRT-PcpcB-Gm**-tB0014-FRT-flv3_down_{—}1kb) the plasmid map with annotation is depicted in FIG. 141 and the sequence is depicted in SEQ ID NO: 91.

[0560] In yet another embodiment, an integrative plasmid is TK618 (oriVT_flv3_up_{—}2kb_FRT-PcpcB-Gm**-tB0014-FRT-flv3_down_{—}2kb) the plasmid map with annotation is depicted in FIG. 142 and the sequence is depicted in SEQ ID NO: 92.

[0561] In an embodiment, an integrative plasmid is TK619 (oriVT_flv3_up_{—}3kb_FRT-PcpcB-Gm**-ter-FRT-flv3_down_{—}3kb) the plasmid map with annotation is depicted in FIG. 143 and the sequence is depicted in SEQ ID NO: 93.

[0562] In an embodiment, an integrative plasmid is TK572 (oriVT_recJ_up_FRT-PcpcB-Gm**-tB0014-FRT_recJ_down) the plasmid map with annotation is depicted in FIG. 144 and the sequence listing is depicted in SEQ ID NO: 94.

[0563] In an embodiment, an integrative plasmid is TK567 (oriVT_recJ2_up_FRT-PcpcB-Gm**-tB0014-FRT_recJ2_down) the plasmid map with annotation is depicted in FIG. 145 and the sequence listing is depicted in SEQ ID NO: 95.

[0564] In an embodiment, an integrative plasmid is TK596 (oriVT_narB_up_FRT-PcpcB-Gm**-tB0014-FRT_narB_down) the plasmid map with annotation is depicted in FIG. 146 and the sequence listing is depicted in SEQ ID NO: 96.

[0565] In a certain embodiment, an integrative plasmid is TK597 (oriVT_argH_up_FRT-PcpcB-Gm**-tB0014-FRT_argH_down) the plasmid map with annotation is depicted in FIG. 147 and the sequence listing is depicted in SEQ ID NO: 97.

[0566] In an embodiment, an integrative plasmid is TK598 (oriVT_leuB_up_FRT-PcpcB-Gm**-tB0014-FRT_leuB_down) the plasmid map with annotation is depicted in FIG. 148 and the sequence listing is depicted in SEQ ID NO: 98.

[0567] In an embodiment, an integrative plasmid is TK616 (oriVT_ycf37_up_FRT-PcpcB-Gm**-tB0014-FRT_ycf37_down) the plasmid map with annotation is depicted in FIG. 149 and the sequence listing is depicted in SEQ ID NO: 99.

### Kits for Producing Compounds of Interest

[0568] In an embodiment, a kit for producing a compound of interest using genetically enhanced ABICyano1 host cells includes genetically enhanced ABICyano1 host cells, a vessel for culturing the host cells and a means for illumination of the host cells. In an embodiment, the host cells of the kit produce ethanol and the means for illumination is photosynthetically active radiation from the sun. In an embodiment, the means for illumination of the host cells include lamps or light emitting diodes or a combination thereof. The vessel of the kit can be a photobioreactor which is at least partly transparent for the radiation emitted by the means for illumination of the host cells. In particular embodiments, any of the photobioreactors disclosed in the PCT application WO 2008/055190 A2, which is hereby incorporated in its entirety by reference, can be used. Furthermore the kit also can also include means for separating the compound, preferably ethanol from the growth medium as, for example, disclosed in the PCT application WO2011/103277 A1, which is hereby incorporated in its entirety by reference.

ABiCyano1 Free from Antibiotic Resistance Genes

[0569] In certain strains of genetically enhanced cyanobacteria, antibiotic resistance genes are paired with inserted genes of interest in order to improve the genetic stability of the inserted gene when an antibiotic is present in the medium. It would be beneficial, however, to be able to construct a stable, genetically enhanced Cyanobacterium sp. ABICyano1 strain that does not contain an antibiotic resistance gene, and does not require the presence of the corresponding antibiotic in order to maintain the inserted genes.

[0570] In an example, a genetically enhanced ethanologenic Cyanobacterium sp. ABICyano1 that is free of antibiotic resistance genes is prepared. The construction of an antibiotic-resistance-cassette free strain is based on the inactivation of an essential gene (e.g. argH) or a conditionally essential gene (e.g. narB) located on the chromosomal DNA, and its replacement on the plasmid that carries the inserted genes of interest.

[0571] In a more specific example, the construction of an antibiotic-resistance-cassette free strain is based on the inactivation of the endogenous (conditionally) essential genes, narB and argH, which are both located on the chromosomal DNA, and then placing a functional narB or argH gene on the extrachromosomal plasmid that contains the ethanol cassette (or other inserted gene of interest). Essentially, this results in the functional narB or argH gene being relocated from the chromosomal DNA to the recombinant plasmid.

[0572] Because the argH and narB gene products are (conditionally) essential for the survival of the cell, the presence of the plasmid that the argH or narB gene has been moved to also becomes essential for the survival of the cell. This is a way of preserving the extrachromosomal plasmid (and any genes it carries) without the need of using antibiotics in the medium. This method is particularly useful for commercial scale growth of a given strain.

[0573] In one illustrative embodiment, the method involves the following steps: the location of the argH and narB gene is identified in the ABICyano1 genome. The greater than 2000 kb upstream and downstream flanking regions of the argH and narB gene are identified. A DNA fragment for the knockout of argH or narB is prepared, having the greater than 2,000 kb upstream region of the narB or argH gene; the sacB cassette or the galK gene driven by a suitable inducible promoter, a gentamycin resistance gene driven by a suitable promoter, and a greater than 2,000 kb downstream region of the narB or argH gene as well as oriVT enabling replication in E. coli and conjugative transfer. This construct introduced to Cyanobacterium sp. ABICyano1 by conjugation. Successful transformants will contain a sacB/Gm or galK/Gin fragment in place of the original narB or argH gene.

[0574] Additionally, the cells have also been transformed with an extrachromosomal plasmid having 1) a functional narB or argH gene and 2) the ethanol cassette genes.

[0575] The transformed cells are grown on increasing amounts of gentamycin in order to select for transformed cells where all wild-type copies of the narB or argH gene are completely absent and replaced by the mutated gene copy version. The step of growth on high amounts of antibiotic is repeated as needed until a cell is selected that has no chromosomal copies of the original narB or argH gene.

[0576] Subsequently, in order to remove the gentamycin resistance gene and the counter-selectable marker sacB or galK gene, the following method can be used. The sacB gene encodes the enzyme levansucrase from Bacillus subtilis that confers sucrose sensitivity on gram-negative bacteria such as cyanobacteria. SacB is lethal to the cyanobacterial cells in the presence of sucrose. This causes any cells having the gene sacB to die in the presence of sucrose. Thus, by adding sucrose to the sacB/Gin transformed cells, and then selecting for surviving cells, one can select for cells that have lost the sacB/Gm cassette. In another embodiment, if galK is used as a counter-selection marker which encodes the galactokinase gene from E. coli and confers sensitivity to 2-deoxy-galactose (2-DOG) on gram-negative bacteria such as cyanobacteria. Gall is lethal to the cyanobacterial cells in the presence of 2-DOG. This causes any cells having the gen galK to die in the presence of 2-DOG. Thus, by adding 2-DOG to the galK/Gin transformed cells and then selecting for surviving cells, one can select for cells that have lost the galK/Gin cassette

[0577] Resulting cells would have the narB/ethanol cassette or argH/ethanol cassette located on the extrachromosomal plasmid, but would not contain sacB or galK, an antibiotic resistance gene, or the original (chromosomally located) narB or argH gene.

[0578] By use of this and related methods, genetically enhanced, ethanol producing cyanobacterial cells are obtained that do not have antibiotic resistance genes, and that also maintain the ethanol cassette without the need for antibiotics. Further essential or conditionally essential genes which can be applied alternatively to narB and argH to create antibiotic free cells include leuB, pyrF, nirA and ggpS, narB, nirA and ggpS are conditionally essential genes while leuB and pyrF are essential genes.

### ABICyano1 p6.8 Derived Plasmids

[0579] In an embodiment, #1658 (pABIcyano1-PnirA2-zmPDC(opt3)-dsrA-Prbc(optRBS)-synADHoop) whose plasmid map is depicted in FIG. 118 (SEQ ID NO: 72) is a plasmid useful for production of compounds of interest in ABICyano1.

[0580] In another embodiment, #1663 (pABIcyano1-PnirA*4-zmPDC(opt3)-dsrA-Pibc*(optRBS)-synADHoop) whose plasmid map is depicted in FIG. 119 (SEQ ID NO: 73) is a plasmid useful for production of compounds of interest in ABICyano1.

[0581] In another embodiment, #1697 (pABIcyano1-PnirA*3-zmPDC(opt3)-dsrA-Prbc*(optRBS)-synADHoop) whose plasmid map is depicted in FIG. 120 (SEQ ID NO: 74) is a plasmid useful for production of compounds of interest in ABICyano1.

[0582] In an embodiment, #1932 (pABIcyano1PnirA*2-zmPDC(opt3)\dsrA-PcpcB-ADH111(opt)_trbcS) whos plasmid map is depicted in FIG. 150 (SEQ ID NO: 100) is a plasmid useful for production of compounds of interest in ABICyano1.

[0583] In another embodiment, #1933 (pABIcyano1-PnirA*2-zmPDC(opt3)\dsrA-PcpcB-Adh916(opt)_trbcS) whose plasmid map is depicted in FIG. 151 (SEQ ID NO: 101) is a plasmid useful for production of compounds of interest in ABICyano1.

[0584] In an embodiment, #1934 (pABIcyano1-PnirA*2-zmPDC(opt1)\dsrA-PcpcB-ADH1520(opt)_trbcS) whose plasmid map is depicted in FIG. 152 (SEQ ID NO: 102) is a plasmid useful for production of compounds of interest in ABICyano1.

[0585] In yet another embodiment, #1935 (pABIcyano1-Porf0316-zmPDC(opt3)\dsrA-PcpcB-ADH111(opt)_trbcS) whose plasmid map is depicted in FIG. 153 (SEQ ID NO: 103) is a plasmid useful for production of compounds of interest in ABICyano1.

[0586] In an embodiment, #1936 (pABIcyano1-Porf0316-zmPDC(opt3)\dsrA-PcpcB-Adh916(opt)_trbcS) whose plasmid map is depicted in FIG. 154 (SEQ ID NO: 104) is a plasmid useful for production of compounds of interest in ABICyano1.

[0587] In another embodiment, #1937 (pABIcyano1-Porf0316-zmPDC(opt1)\dsrA-PcpcB-ADH1520(opt)_trbcS) whose plasmid map is depicted in FIG. 155 (SEQ ID NO: 105) is a plasmid useful for production of compounds of interest in ABICyano1.

### Optimized Promoters

[0588] In an embodiment, copper-promoter variants with improved RBS are depicted in FIG. 121. In another embodiment, copper-promoter variants with improved −10 region (Pribnow box) are depicted in FIG. 122. In yet another embodiment, optimized Porf3126 (PsmtA) derived from ABICyano1 is depicted in FIG. 123.

### PDC Activity in Zinc-Inducible Strains

[0589] In an embodiment, and as depicted in FIG. 124, PDC activity in Zn²⁺ induced ABICyano1 strains TK490 and #1762 was measured. In an embodiment, ABICyano1 strain #1762 (pABIcyano1-Porf3126*-zmPDC(opt1)dsrA-Prbc*(optRBS)-ADH111(opt)\ter) whose plasmid map with annotations is depicted in FIG. 126 (SEQ ID NO: 76) comprises an improved variant of the native zinc-inducible orf3126 promoter that exhibits substantially higher PDC activity compared to the strain TK490 comprising the native orf3126 promoter. When induced with 5 μM zinc, strain TK490 exhibits PDC activity of 0.62 μmol/mg*min while in strain #1762, the PDC activity is 5.8 μmol/mg*min which is about 10-fold greater due to the use of the improved Porf3126* variant with introduced nucleotide changes within both smtB binding sites and the RBS as depicted in FIG. 123. A plasmid map of #1753 (pABIcyano1-PnirA-zmPDC(opt1)_dstA-Prbc*(optRBS)-Adh111_ter) with sequence annotation is depicted in FIG. 127 (SEQ ID NO: 77).

[0590] The present disclosure is further described by the following non-limiting examples. However, it will be appreciated that those skilled in the art, on consideration of this disclosure, may make modifications and improvements within the spirit and scope of the present disclosure.

### EXAMPLES

### Example 1

### Bacterial Strains, Growth Conditions, and Selection of Transformants

[0591] E. coli strains HB101 (Promega), XL 10-Gold (Stratagene), and α-select (Bioline) were grown in Luria-Bertani (LB) medium at 37° C. Ampicillin (50 μg/mL), kanamycin (50 μg/mL), and chloramphenicol (34 μg/mL) were used when appropriate. Cultures were continuously shaken overnight at 200 rpm and at 100 rpm when used for conjugation. ABICyano1 was cultured at from 28° C. to 37° C. in liquid BG11 fresh water medium on a reciprocal shaker at 150 rpm under continuous illumination of approximately 30-40 μmol photons*m⁻²*sec⁻¹.

[0592] Unless otherwise noted, the ABICyano1 transformants were selected on solid BG11 medium containing 10-20 μg/mL kanamycin and were maintained on BG11 plates containing 40 μg/mL kanamycin. For growth in liquid freshwater BG11 medium, 30-40 μg/mL of kanamycin was applied.

[0593] Plasmid DNA from E. coli strains was isolated using a GeneJet Plasmid Miniprep Kit (Fermentas) according to the manufacture's protocol. For plasmid isolation from putative ABICyano1 transformants, total DNA was prepared according to Saha et al. (2005), World Jour. Microbiol Biotechnol 21:877-881.

[0594] For plasmid rescue from putative ABICyano1 transformants, total DNA was isolated and transformed in both α-select and XL10-Gold. E. coli colonies were selected for kanamycin resistance. DNA was isolated from single colonies and analyzed by PCR and restriction analysis for the presence of the correct plasmid. In particular, the endogenous plasmid of ABICyano1 was captured with the EZ-Tn5 (R6Kγori/KAN-2) Tnp Transposome kit (Epicentre. Madison, Wis.) by following the protocol provided by the manufacture. The rescued clones were amplified in TransferMax™ EC100D™ pir-116 electro-competent E. coli host cells (Epicentre, Madison, Wis.). Plasmid DNA was prepared with Qiagen plasmid Maxi kit (Qiagen Inc., Valencis, Calif.). Approximately 8 to 16 rescued clones were selected for sequencing via the conventional Sanger sequencing protocol. Protein-coding genes from each of the plasmids were predicted with the gene finder Glimmer (Delcher A L, Bratke K A, Powers E C, & Salzberg S L (2007) Identifying bacterial genes and endosymbiont DNA with Glimmer. Bioinformatics 23(6):673-679) version 3.02, followed by BLAST against the NCBI NR database.

### Example 2

### Preparation of Cyanobacterial Culture Medium

[0595] BG-11 stock solution was purchased from Sigma Aldrich (Sigma Aldrich, St. Louis, Mo.). Stock solutions of the antibiotics spectinomycin (100 mg/mL) and kanamycin (50 mg/mL) were purchased from Teknova (Teknova, Hollister, Calif.). Stock solution of the antibiotic gentamycin (10 mg/mL) was purchased from MP Biomedicals (MP Biomedicals, Solon, Ohio). Marine BG-11 (mBG-11) was prepared by dissolving 35 g Crystal Sea Marinemix (Marine Enterprises International, Inc., MID) in 1 L water and supplementing with BG-11 stock solution. Vitamin B₁₂ (Sigma Alchich) was supplemented to mBG-11 to achieve a final concentration of 1 μg/L, as needed.

### Example 3

### Ethanol Tolerance of ABICyano1

[0596] ABICyano1 strain was tested to determine its tolerance to the presence of ethanol in the culture medium, in comparison to two publicly available strains, Synechocystis PCC 6803 and Synechococcus PCC 7002. The cells were cultured in 100 mL Erlenmeyer flasks with 50 mL culture volume in marine BG11 media (35 psu). Ethanol was added to the cultures to obtain a concentration of 1% (v/v) ethanol. The cultures were examined weekly for cell viability and remaining ethanol concentration. At each of the weekly samplings, the ethanol level was replenished as needed in order to maintain the 1% (v/v) ethanol concentration. The cells were also examined using a microscope (light microscope, phase contrast, auto-fluorescence). If more than 50% of cells were intact the test was continued. Cyanobacterial cells were deemed to be intact if cell morphology did not change significantly upon addition of ethanol, the cells were still green, and cells were not lysed after addition of ethanol. The number of weeks that each of the strains remained at least 50% viable in the cultures spiked with 1% ethanol was determined. Growth for at least 8 weeks is considered to be a positive screening result. The results indicate that Synechocystis sp. PCC 6803 can withstand at least 1% ethanol in the medium for 3 weeks, that Synechococcus sp. PCC 7002 can withstand at least 1% ethanol in the medium for 13 weeks and that Cyanobacterium sp in particular ABICyano1, can withstand at least 1% ethanol in the medium for at least 16 weeks.

### Example 4

### Temperature Tolerance of ABICyano1

[0597] Wild type ABICyano1 was tested to determine its ability to grow at various temperatures. The initial starting cultures (50 mL in an Erlenmeyer flask) were grown under standard growth conditions (continuous 28° C. and light). The cultures were diluted to a chlorophyll content of about 5 μg/mL. The temperature changes during the assay were made without any prior temperature adaptation of the cultures. All tests were performed in marine media in a day/night cycle (14/10 h) for temperature (test depending) and light intensity (40 μmolE m⁻²sec⁻¹ or darkness). The temperature tolerance tests were performed with increasing temperature profiles: maximum peak of 2 h at 45° C., 48° C., 50° C., 53° C., 55° C. and a day/night difference of 18° C. Each temperature profile (45° C., 48° C., 50° C., 53° C. and 55° C.) was run for 7 days. Cultures were sampled on days 0, 2, 5 and 7 with determination of OD₇₅₀ (if possible) and chlorophyll. If a strain was grown under one temperature profile, the culture was diluted to same starting chlorophyll content and directly tested in the next higher temperature profile. An increase in chlorophyll content was used as the growth indicator. As depicted in Table 1, the results of the test indicate that ABICyano1 can tolerate culturing conditions of at 48° C., 50° C., and at least 53 to 55° C. for at least two hours over a period of time of at least 7 days.

[0598] The growth of wild type ABICyano1 was compared with Synechococcus PCC 7002 to elucidate its ability to grow in a photobioreactor environment while under extreme temperature fluxuations. Cultivation of ABICyano1 was performed in 0.5 L round photobioreactor (PBR) glass vessels (Schott) with implemented ports for sampling, in and out gas tubing, and pH as well as oxygen sensors. Mixing was via a magnetic stir bar, pH is controlled via CO₂ inflow. The oxygen and pH sensors are connected to an oxygen and pH measurement box (Crison Instruments, SA), and the gas flow is controlled by mass flow controller system (Vögtlin Instruments). All parameters (oxygen, temperature, gas flow, pH) are controlled and monitored using a computer software programmed by HTK Hamburg. The system temperatures of the PBRs were set to be comparable to the temperature profiles used in the temperature tolerance test, the results of which are depicted in Table X, with maximum temperatures of 45° C., 50° C. and 55° C. as compared to the standard PBR growth temperature of 37° C. Each temperature profile was run on an experimental culture for 7 days. Culture sampling was performed three times per week and OD₇₅₀, chlorophyll content and protein content were measured. At the beginning and at the end of each week, the dry weight of the accumulated biomass was determined. If a strain survived a given temperature profile, the culture was diluted to the same starting condition (chlorophyll content of about 10 μg/mL) and the next higher temperature profile was tested.

[0599] As depicted in FIG. 2, ABICyano1 is able to grow well at high temperatures, as compared to other genera, such as Synechococcus PCC 7002.

### Example 5

### Oxygen Tolerance of ABICyano1

[0600] ABICyano1 cells containing a recombinant pdc gene under the transcriptional control of P_{nirA} and a recombinant Synadh gene under the control of P_{rpsL} (P_{rpsL} is the promoter of the 30S ribosomal protein S12) were grown in mBG11 medium. Cells were diluted to a starting OD of approximately OD₇₅₀=1. Cells were cultivated in 500 mL photobioreactors, round vessels with a 9.5 cm diameter. PBRs were illuminated with day/night cycle of 12 h/12 h from two sides with fluorescent tubes. The light intensity was approximately 400 μE m⁻² s⁻¹ from each side. Temperature followed the day/night cycle with 37° C. during the illumination phase and 28° C. during the night. Cultures were constantly mixed with a magnetic stirrer with 450 rpm. CO₂ was supplied and regulated by monitoring pH (on/off modus); pH was maintained at 7.3±0.05 by computer-controlled supply of CO₂ (as 5% (v/v) CO, in air) into the medium. Growth medium was mBG11. Three PBRs were run in parallel. The PBRs were purged with three different oxygen/nitrogen mixtures with a flow rate of 100 mL min⁻¹ during the illumination period. During the night phase, gas was not supplied to the PBR. The mixtures of oxygen and nitrogen (here given in percent oxygen (v/v)) were obtained with computer-controlled mass flow meters. The actual oxygen concentration in the medium was measured online with optical oxygen sensors and a multi-channel fiber optic oxygen transmitter (OXY-4 mini; PreSens). In contrast to Clark-type oxygen electrodes, this setup allows the measurement of very high oxygen concentrations.

[0601] At different time points samples were taken and analyzed for (i) ethanol and acetaldehyde in the medium, (ii) Absorbance at OD₇₅₀, (iii) chlorophyll content and (iv) total protein. Chlorophyll content and total protein were measured as in Tandeau De Marsac, N. and Houmard, J. in: Methods in Enzymology. Vol. 169, 318-328. L. Packer, ed., Academic Press, 1988, which is hereby incorporated by reference. In order to characterize the energy metabolism of the cells, the oxygen production rates in the light and the oxygen consumption rate in the dark were also measured. A Clark-type electrode (Rank brothers, diameter 1 cm) was used. Cells were diluted with mBG11 to 5 to 10 μg chlorophyll/mL, NaHCO₃ was added to 5 mM. Temperature was adjusted to 37° C. Illumination was with a slide projector H50 (Pentacon). For the measurement of P/I curves, light intensities were adjusted by varying the distance between projector and electrode.

[0602] The cultures of ABICyano1 cells containing a recombinant pdc gene under the transcriptional control of P_{nirA} and a recombinant Synadh gene under the control of P_{rpsL} were purged with gas mixtures containing 21%, 70% and 80% (v/v) oxygen in nitrogen. Twenty one percent oxygen in nitrogen corresponds to air. Purging the cultures with 21% oxygen resulted in an oxygen concentration in the growth medium of approximately 200 μmol/L. Purging the cultures with 70% oxygen resulted in oxygen concentration of greater than 650 μmol/L during the day period and greater than 300 μmol/L during the “night”. Purging the cultures with 80% oxygen resulted in a reading during the day of greater than 900 μmol/L (in some cases greater than 1000 μmol/L) and greater than 600 μmol/L during the “night”. The higher oxygen concentrations in the growth medium are caused by an increased oxygen production through photosynthesis.

[0603] The growth rates for the parameters of absorbance at OD₇₅₀, ethanol production rates, and chlorophyll content were calculated. The results are summarized in table 10. For these calculations, the measured data were fitted to a regression line, and the slope was used to calculate the increase per 24 h. The quantitative analyses depicted in table 5 shows that even for the high oxygen concentrations of 70 and 80% oxygen, the decrease in ethanol production and growth in ABICyano1 was small.

TABLE 10

| | 21% oxygen | 70% oxygen | 80% oxygen |
|---|---|---|---|
| Ethanol | 0.0236%/d | 0.0202%/d | 0.0213%/d |
| | 100% | 85% | 90% |
| Growth | 0.614 OD₇₅₀/d | 0.583 OD₇₅₀/d | 0.581 OD₇₅₀/d |
| | 100% | 95% | 95% |
| Chlorophyll | 3.446 Chl/d | 2.878 Chl/d | 2.791 Chl/d |
| | 100% | 84% | 81% |

[0604] ABICyano1 growth and ethanol production were compared to Synechococcus PCC 7002 growth and ethanol production. As with ABICyano1, Synechococcus PCC 7002 was transformed with a recombinant pdc gene under the transcriptional control of P_{nirA} and a recombinant Synadh gene under the control of P_{rpsL}. In contrast to ABICyano1, significant effects on ethanol production, cellular growth and chlorophyll content were found for the recombinant Synechococcus PCC 7002 strain when purged with the different oxygen concentrations. Table 11 shows that purging with 80% oxygen decreased the ethanol production rate by 28%, decreased cell growth by 36%, and decreased chlorophyll content by 51%, during the course of the experiment. A comparison of tables 10 and 11 shows that the adverse effect of high oxygen concentrations on Synechococcus PCC 7002 growth, ethanol production and chlorophyll is significantly greater than for ABICyano1.

TABLE 11

| | 21% oxygen | 70% oxygen | 80% oxygen |
|---|---|---|---|
| Ethanol | 0.00646%/d | 0.00499%/d | 0.00466%/d |
| | 100% | 77% | 72% |
| Growth | 0.959 OD₇₅₀/d | 0.797 OD₇₅₀/d | 0.612 OD₇₅₀/d |
| | 100% | 83% | 64% |
| Chlorophyll | 3.710 Chl/d | 2.455 Chl/d | 1.800 Chl/d |
| | 100% | 66% | 49% |

[0605] The above results show that ABICyano1 is less sensitive to oxygen, than the ethanol producing Synechococcus PCC 7002, which was tested in parallel under comparable conditions. For the latter strain 70% (v/v) oxygen in nitrogen was sufficient to significantly inhibit growth and ethanol production.

### Example 6

### Transformation of ABICyano1 with p6.8 Kb Based Shuttle Vector

[0606] The endogenous 6.8 kb plasmid of ABICyano1 can be used as a means of shuttling exogenous DNA to cyanobacterial host cells. By inserting an origin of replication that is effective in E. coli (such as R6KOri), the p6.8 kb plasmid DNA can be manipulated in bacteria, such as E. coli, to incorporate genes and sequences of interest into a recombinant p6.8 kb. For example, modifications to decrease the effectiveness of endogenous restriction systems that are present in ABICyano1, such as methylation, can be performed.

[0607] The presence of an origin of replication that is already on ABICyano1 can assist with replication of the recombinant p6.8 kb once it is transferred into a host cell. Multiple cloning sites can be added to allow for several different antibiotic resistance genes to be added, if desired. Multiple cloning sites can also be inserted to allow for ease of insertion of various expression cassettes, such as the pdc/adh gene cassette for ethanol production. In this way, various sequence segments of the plasmid can be replaced with other sequence segments as needed.

### Example 7

### Detection of Endogenous Restriction Endonucleases in ABICyano1

[0608] Restriction endonucleases (RENO expressed by cyanobacteria can be a major barrier for successful transformation of cyanobacterial host cells. Accordingly, the presence of RENs in ABICyano1 has been analyzed. Bioinformatic analyses predicted the following RENs for ABICyano1: HgiDI (AcyI), AvaI, AvaIII, BstEII, and HpaII. Prediction of RENs was conducted by comparing a query set of all the encoded amino acid (AA) sequences in the ABICyano1 draft genome against the REBASE (http://rebase.neb.com/rebase/rebase.html), restriction enzyme database maintained by the New England Biolabs (NEB) using the basic local alignment search tool (BLAST). Significant hits were pooled and manually examined for the presence of restriction-modification motifs using bioinformatic analyses including BLAST against NR (ncbi.nlm.nih.gov/blast/blast_databases.shtml), PFam (pfam.sanger.ac.uk/) and SMART (smart.embl-heidelberg.de/). These bioinformatically predicted RENs were further verified through biochemical assay of crude cellular extract of ABICyano1.

[0609] Lane 3 of FIG. 55, depicts that plasmids intended for transformation were cleaved by a crude extract of ABICyano1. In order to improve the efficiency of a transformation protocol, protection against the damaging effects of RENs was needed. This was achieved by methylation using the commercial CpG methylase M.SssI, the results of which are depicted in FIG. 55, lane 4.

[0610] Crude extract from ABICyano1 was prepared as follows: 50 mL of liquid pre-culture was inoculated to an OD₇₅₀ₙₘ 0.5-1. After growth for 10 days, 30 mL of the ABICyano1 culture of was pelleted (5 minutes at 3000×g at room temperature), washed once with lysis buffer (40 mM sodium hydrogenphosphate pH 7.4, 1 mM EDTA, 5% (v/v) glycerol) and resuspended in 1 mL lysis buffer. ABICyano1 cells were disrupted by glass beads using a tissue lysis apparatus at full speed for 4 minutes. The supernatant was then withdrawn and centrifuged twice at 14000×g at room temperature. One U of RNase per mL was added to the final supernatant. Restriction analysis on plasmids followed by sequencing was used to determine the presence of RENs HgiDI (AcyI), and AvaI in the crude extract of ABICyano1.

### Example 8

### Competent ABICyano1 Cells for Transformation by Conjugation

[0611] Many cyanobacteria produce extracellular polymeric substances (EPS), however, the appearance and composition of the EPS layer are strain specific and dependent on environmental conditions. EPS can be associated to the cell surface or released to the surrounding medium (Pereira et al., 2009, FEMS Microbiol. Rev. 33:917-941). While the released substances can in some cases be easy to remove from being associated with the cyanobacterial cells, in other cases the EPS is difficult to remove.

[0612] ABICyano1 was stained with scribtol black (thawing ink for calligraphy, Pelican), which cannot penetrate EPS, to test for the presence of EPS. As depicted in FIG. 1B, staining of ABICyano1 cells with scribtol black resulted in a white/yellowish layer around the ABICyano1 cells indicating a lack of staining by scribtol black. Thus, FIG. 1B depicts micrographs of stained ABICyano1 cells showing that the EPS is attached to the cells. This layer may decrease the ability of the ABICyano1 cells to accept foreign DNA during the conjugation process for transformation.

[0613] After several unsuccessful attempts, the inventors were able to successfully transform the ABICyano1 cells after using methods to decrease the EPS layer. Thus, the following method was used to decrease the EPS layer prior to conjugation. The method involves several steps: treatment of cells with NAC, washing steps that utilize NaCl, treatment with lysozyme, and subsequent washing followed by a conjugation procedure.

[0614] Two hundred mL of an exponentially growing culture (OD₇₅₀ₙₘ greater than about 0.5 and less than about 1.0) was incubated with NAC for 2 days at 16° C. (end concentration of NAC is about 0.1 mg/mL) without shaking. This pretreatment was followed by several steps to degrade the EPS and to weaken the cell wall. The pretreated culture was pelleted at 4400 rpm and washed with 0.9% NaCl containing 8 mM EDTA.

[0615] For further treatment with lysozyme, the cell pellet was resuspended in 0.5 M sucrose and incubated 60 min at room temperature (RT) with slow shaking (85 rpm). Then, cells were centrifuged and resuspended in 40 mL of a solution containing 50 mM Tris (pH 8.0), 10 mM EDTA (pH 8.0), 4% sucrose, and 20-40 μg/mL lysozyme. After incubation at rt for 10-15 min, cells were centrifuged and washed three times using different washing solutions; i) 30 mM Tris containing 4% sucrose and 1 mM EDTA; ii) 100 mM Tris containing 2% sucrose and iii) with BG11 medium. All centrifugation steps before lysozyme treatment were performed at 4400 rpm for 10 min at 10° C. All centrifugations after the lysozyme treatment were performed at 2400 rpm for 5 min at 4° C. Resuspended cells were used for conjugation.

### Example 9

### Transformation of ABICyano1 by Conjugation

[0616] Gene transfer to ABICyano1 was performed using conjugation. Generated plasmids containing oriVT were used for conjugation. The shuttle vectors were transformed into ABICyano1 following a modified conjugation protocol which includes the pretreatment of ABICyano1 to reduce its EPS layer as described in example 17.

[0617] Triparental mating was performed as follows: E. coli strain J53 bearing a conjugative RP4 plasmid and E. coli strain HB101 bearing the cargo to be introduced into ABICyano1 and the pRL528 helper plasmid (for in vivo methylation) were used. E. coli strains were grown in LB broth supplemented with the appropriate antibiotics overnight at 37° C. with shaking at 100 rpm. An aliquot of 3-5 mL of each culture was centrifuged, washed twice with LB medium and resuspended in 200 μL LB medium. Subsequently, the E. coli strains were mixed, centrifuged and resuspended in 100 μL BG11 medium. Two hundred mL of exponentially growing cyanobacterial culture (OD₇₅₀ₙₘ of greater than 0.5 and less than 1.0) was centrifuged (3000 rpm, 10 min), pretreated to degrade the EPS layer as described in example 17, and subsequently washed and resuspended in 400 μL BG11 culture medium containing Tris/sucrose buffer (example 17). A 100 μL aliquot of resuspended cyanobacterial and E. coli cultures was mixed and applied onto a membrane filter (Millipore GVWP, 0.22 μm pore size) placed on the surface of solid BG11 medium supplemented with 5% LB. Petri dishes were incubated under dim light (5 μE m⁻² s⁻¹) for 2 days. Cells were then resuspended in fresh BG11 medium and plated onto selective medium containing 10 and 15 μg/mL kanamycin, respectively. The following selection conditions were used: light intensity of approximately 20-40 μE m⁻² s⁻¹ at a temperature of approximately 28° C. Transformants were visible after approximately 7-10 days. The transformant colonies were then plated on BG11 media containing 15 μg/mL kanamycin and then transferred stepwise to higher kanamycin concentrations (up to kanamycin 60 μg/mL) to aid in the selection process.

### Example 10

### Transformation of ABICyano1 by Electroporation

[0618] Electroporation can also be used for successful transformation of ABICyano1 using, for example, the same plasmids as for conjugation, but with lower efficiency.

[0619] As with the conjugation transformation protocol (example 18), strain-specific adaptations of standard electroporation protocols need to be made to avoid DNA digestion by endogenous restriction enzymes and to allow DNA entry through the EPS layer. To achieve successful electroporation. DNA is protected against endogenous restriction enzymes by methylation. Prior to electroporation, ABICyano1 cells are pretreated with positively charged polyaminoacids such as poly-L-lysine hydrobromide or poly-L-omithine hydrochloride or combinations thereof (in particular poly-L-lysine hydrobromide) in order to increase the DNA uptake efficiency.

[0620] As an example, one hundred mL of exponentially growing ABICyano1 cultures (corresponding to a cell density of approximately 2×10⁷ cells/mL), were harvested, washed and resuspended in 0.9% NaCl containing 25 mM Tris-HCl (pH 8.0). Poly-L-lysine hydrobromide was added to the resuspended cells to obtain a final concentration of 50 μg/mL. ABICyano1 cells were then incubated for several hours or overnight before electroporation.

[0621] In a typical procedure, 50 ml of poly-L-lysine hydrobromide treated ABICyano1 cells were harvested and treated with 30 mL ice-cold BG11 containing 6% DMSO. After incubation on ice for 20 min, cells were harvested and frozen in liquid nitrogen for 15 min. These pre-frozen cells were thawed by adding 15 mL ice-cold buffer containing 1 mM HEPES (pH7.5), 0.2 mM K₂HPO₄ and 0.2 mM MgCl₂. The cells were washed sequentially once more with 1 mM HEPES and ETMT buffer containing 0.1 mM HEPES, 0.2 mM K₂HPO₄ and 0.2 mM MgCl₂. The cells were harvested by centrifugation at 15000×g for 5 min. All of the washes and centrifugations were carried out on ice or in a pre-chilled centrifuge (4° C.). For each electroporation procedure, 3 μg methylated DNA is added to 100 μL of concentrated cells. Cells were electroporated in a cuvette with a 2 mm gap between the electrodes and pulsed once in a Gene Pulse X-cell (Bio-Rad) using an exponential decay protocol (electric field strength of 8 kV/cm, capacitance of 25 μF, resistance of 400 ohms, for a time of approximately 8-9 ms). After electroporation, 1-2 mL BG11 medium was immediately added to the cyanobacterial suspension, which was subsequently transferred to a 50 mL flask containing 15 mL fresh BG11 medium. After incubation for 1-2 days under normal light (30-40 μE m⁻² s⁻¹) with gentle shaking at 30° C. recovered cultures were centrifuged, resuspended in 500 μL BG11 medium and placed onto selective media (BG11 containing 20 μg/mL Km or 40-60 μg/mL of spectinomycin).

### Example 11

### Determination of Ethanol Production

[0622] GC headspace measurements were performed on a Shimadzu GC-2010 gas chromatograph with a flame ionization detector. The instrument is connected in-line with a Shimadzu PAL LHS2-SHIM/AOC-5000 autosampler. The autosampler has a gas-tight syringe for transfer of headspace aliquots from the culture samples to the analytical unit. Culture samples in the autosampler are illuminated from the bottom with a LED acrylic sheet equipped with a dimmer. Mixing of the samples in the autosampler is accomplished with the IKA RO5 power magnetic stirrer. A heating mat KM-SM3 of Mohr & Co in combination with the JUMO dTRON 316 temperature regulator is used for thermostatisation of the culture samples in the autosampler. The gas chromatograph uses helium as a carrier gas as well as hydrogen and artificial air as fuel gas and oxidizer gas, respectively, for the flame ionization detector. Oxidizer air is generated with the generator WGAZA50 from Science Support. The gas chromatograph is equipped with a FS-CS-624 medium bore capillary with a length of 30 in, internal diameter of 0.32 mm and film thickness of 1.8 μm from the GC supplier Chromatographic Service GmbH.

[0623] Sample preparation for GC headspace measurements was as follows. Hybrid clones were grown on BG11 plates containing inducing agent or without supplementation of the inducing agent. A sample was prepared by scratching an individual clone from the BG11 plate and resuspending the corresponding clone in mBG11 liquid medium. The addition of inducing agent triggered ethanol production in the sample by induction of the inducible promoter driving overexpression of the recombinant pdc and adh genes. The cell density in the sample was then adjusted to an optical density at 750 nm of approximately 0.7. Two mL of sample were then filled into a gas-tight GC vial for headspace autosampling with a nominal volume of 20 mL. The sample headspace was supplemented with 5 mL CO₂. The vial was tightly closed with a cap containing a self-sealing silicone septum and was then placed into the autosampler rack. The autosampler rack was temperature controlled at a given temperature, for example 37° C.

[0624] If necessary, reference samples can be prepared as 2 mL aliquots with 0.005, 0.01, 0.02, 0.05, 0.1, 0.2, 0.5, 1, 2, 5 and 10 mg/mL ethanol in 35 psu NaCl. Reference samples were placed into the same 20 mL sample containers with self-sealing silicon septum caps for headspace autosampling. For each reference sample, at least six measurements were applied. After the measurements, the resulting peak areas of the reference samples were used for generating two calibration curves, the first in the concentration range from 0.005 to 0.5 mg/mL ethanol and the second one for the concentration range from 0.5 to 10 mg/mL ethanol. The calibration curves were linear.

[0625] The sample incubation temperature in the autosampler was adjusted to a given temperature, for example 37° C. The illumination is set from about 90 μE m⁻² s⁻¹ to about 150 μE m⁻² s⁻¹. In an embodiment, the illumination was set to 120 μE m⁻² s⁻¹. The magnetic stirrer was configured for interval mixing of the samples, with cycles of 2 min mixing at 400 rpm, followed by 90 minutes without mixing. An automated process follows wherein after given periods of time, aliquots of 500 μL of the headspace of the samples are automatically drawn from the headspace with a gas-tight syringe and injected via the injection port into the gas chromatograph for analysis. Before each headspace autosampling, the mixing is changed for 10 mm to continuous mixing with 750 rpm at 37° C. incubation temperature. The syringe temperature was set at 70° C. The fill speed was 250 μL per second, following an initial lag time of 1 second after the septum of the samples has been pierced by the syringe needle. The injection of the aliquot into the gas chromatograph happens with an injection speed of 500 μL per second. Afterwards, the syringe flushes for 3 min with air to prevent sample carryover between two injections. The gas chromatograph runtime was 4 min and 30 s. The injection temperature on the gas chromatograph was 230° C. The column temperature was 60° C. Detection was accomplished with the flame ionization detector at 250° C. process temperature. The makeup gas was nitrogen at 30 mL per minute, the fuel gas is hydrogen at 35 mL per minute and the oxidizer gas is artificial air at 400 nil, per minute.

[0626] After the final measurement, the final optical density at 750 nm of the samples was measured and an average cell density for each sample was determined by calculating the arithmetic mean of the optical density at the starting point and the optical density at the end point of the process. Afterwards, the average ethanol production rate per cell density was calculated.

[0627] Two kinds of measurements were performed, GC online measurements (applied for clone testing and short-term characterizations, and single GC measurements (applied for measurements of EtOH concentration of samples taken from PBR cultivations).

[0628] In a typical experiment for the quantitative determination of acetaldehyde and/or ethanol content in growth media by headspace gas chromatography (GC), the ethanol production of the respective cyanobacterial culture has to be induced 1-3 days prior to the GC measurement to trigger the overexpression of the pdc and Synadh production genes. For instance, to repress the P_{nirA} (e.g. in TK225. TK293) hybrids were grown in mBG11 (artificial seawater) depleted of NO₃⁻, with 2 mM Urea and 2 mM NH₄Cl. To induce the nirA promoter, cells were transferred prior to the GC measurement into mBG11 (artificial seawater salts) with nitrate. For GC measurements, cells were harvested from liquid cultures by centrifugation and then resuspended in the appropriate fresh marine medium ensuring that the induction conditions were maintained. The medium was further supplemented with 50 mM TES, pH 7.3 and 20 mM NaHCO₃. The sample was adjusted to an OD₇₅₀ of 0.7. Two mL samples were then aliquoted per 20 mL GC vial loaded with 3 mL pure CO₂. The tightly closed GC vials were placed onto an illuminated (120 μE m⁻² s⁻¹ from the bottom) headspace auto sampler and were analyzed on the same day on a Shimadzu GC-2010 gas chromatograph equipped with a medium-bore capillary column (FS-CS-624, length 30 m; inner diameter 0.32 mm; film 1.8 μm) and a flame ionisation detector.

[0629] The culture was stirred once in an hour under constant light (approximately 120 μE m⁻² s⁻¹) in GC vials (at 35 CC) on the GC sampling tray. Acetaldehyde and ethanol content were measured online at four different time points during 40 h to 48 h. Measurements could be extended to 72 h.

[0630] After completion of the GC measurements, the final OD₇₅₀ was determined and used to normalize the ethanol production rate according to the average OD₇₅₀ of the cyanobacterial sample. The average OD₇₅₀ was calculated as the arithmetic mean of the OD₇₅₀ₙₘ at the time of sample preparation and the OD₇₅₀ after completion of the GC measurement.

[0631] FIG. 34 depicts the results of the ethanol quantitation. ABICyano1 containing TK293 produced a higher amount of ethanol (˜0.02% (v/v)/OD*d) about 2-4 fold higher versus the production of ethanol when transformed with plasmids TK225.

[0632] The data generated for and depicted in table 9 includes the ethanol production data for various ABICyano1strains. The third column shows the ethanol production rate as determined by a GC vial online assay. The fourth to sixth column show the ethanol production determined for 0.5 L Crison PBR, and for vPBR with different illumination intensities for a period of cultivation of 14 days or 21 days, respectively. These ethanol production data were determined with GC single measurements. The term “vPBR” indicates “vertical photobioreactors”. The following procedure describes the standard lab conditions under which a 1.2 L vPBR is operating as well as the necessary parts, ports, etc. to construct this 1.2 L vPBR. The 1 column vPBR consists of an autoclavable polypropylene flexible film [Profol Kunststoffe GmbH; Germany) with the dimensions of 750 mm total height and a diameter of 50 mm when filled with liquid. The filling volume is about 1.2 L leading to a liquid height of about 620±20 mm and a headspace of about 150±20 mm. The vPBR is equipped with several ports for operation, located on specific positions of the vPBR from bottom to top: a sampling port (60 mm from the bottom), a gas poll (130 mm from the bottom), a pH probe port (300 mm from the bottom), DO₂ probe port (350 mm from the bottom), a medium port (650 mm from the bottom) and a gasₒᵤₜ port (700 mm from the bottom). The illuminated surface area when illuminated from one side is 0.049 m². The standard light conditions is a uniform light field from one side with 125 or 230 μmol m⁻² s⁻¹ at the vPBR surface generated by a light panel which consists of 9 to 12 T5 54W 6500K fluorescent bulbs operating in a 12/12 h day/night cycle. The temperature is set to 39° C.±2° C. during day and 29° C.±2° C., during night. The mixing is realized via the ascending air bubbles through the liquid culture. The gas flow is operating in a constant sparging mode (day and night) with air enriched with 15% CO₂ introduced on demand via pH control (pH setpoint=7.3, day and night) and a flow rate of 38 mL min⁻¹. The number of holes in the sparging tube for a 1.2 L vPBR is approx. 50 holes (perforated from both sides) and the sparging tube length is 220 mm. The standard cell density for starting a cultivation experiment OD₇₅₀ₙₘ=0.5 in mBG11 medium with 35 ppt (parts per thousand) salt (about 35 psu) (for strains that do not aggregate under high-light illumination). Table 9 depicts a list of plasmids for used for transformation of ABICyano1 with ethanologenic cassettes and also depicts ethanol production in ABICyano1 host cells created thereby.

### Example 12

### Determination of Ethanol Production Using Gas Chromatography

[0633] Two kinds of GC headspace measurements were performed:

a) GC online vial measurements (applied for clone testing and short-term characterizations of cultures cultivated in GC vials with a duration of up to 72 hours,
b) single GC single measurements (applied for measurements of EtOH concentrations in samples daily taken from PBR cultures) by measuring the ethanol content after transferring 0.5 mL of the PBR cultures into GC vials after certain points of time of cultivation in the PBR.

[0634] GC single measurements do not involve the cultivation of the strains in the GC vials. GC single measurements were performed in order to characterize the long term ethanol production of strains, which are already known to produce ethanol in sufficient quantities in GC online vial measurements. GC single measurements further differ from GC online vial measurements in the volume of the culture (2 mL in GC online vial and 0.5 mL aliquots taken from a PBR culture in GC single measurements). In single GC measurements only the absolute amount of ethanol produced at a certain point of time is determined, whereas the GC online vial measurements determines the course of ethanol production during a certain period of time up to 72 hours of growing the cells a GC vial under constant illumination. For GC single measurements the sample was heated to 60° C. in order to transfer all ethanol from the liquid phase to the gas phase for the GC headspace chromatography, which resulted in a disruption of the culture. In contrast to that this 60° C. heating step was omitted during GC online vial measurements in order not to destroy the culture and in order to further continue with the culturing of the cells in the GC vial. In the following GC online vial measurements are described.

[0635] GC online vial headspace measurements are performed on a Shimadzu GC-2010 gas chromatograph with Flame Ionization Detector. The detection limit for ethanol quantification is at 0.0005%, but a calibration has to be done for detecting quantities below 0.001%. The instrument is connected in-line with a Shimadzu PAL LHS2-SHIM/AOC-5000 autosampler, comprising a gas-tight syringe for transfer of headspace aliquots from the culture samples to the analytical unit. Specific modifications were introduced as follows: Each sample tray is exposed with a LED acrylic sheet (length: 230 mm, wide: 120 mm, diameter: 8 mm, 24Chip, S4, 5300K), equipped with a dimmer by company Stingl GmbH. Below the sample tray a magnetic stirrer is installed (IKA RO 5 power) allowing for mixing of cultures which are cultivated in (IC vials that stand in the sample tray. The sample trays are penetrating of maximum, so that the GC Vial Stands in the Tray. A heating mat between LED acrylic sheet and the magnetic stirrer (MOHR&Co, one heating circuit, 230 V, 200 Watt, length: 250 mm, wide: 150 mm, diameter: ca. 2.5 mm) with a temperature regulator (JUMO dTRON 316) allows for the incubation of cultures in GC vials at specific temperatures. The gas chromatograph is connected to helium carrier gas as well as hydrogen and artificial air as fuel gas and oxidizer gas, respectively, for the flame ionization detector. Oxidizer air is generated with the generator WGAZA50 from Science Support. The gas chromatograph is equipped with a FS-CS-624 medium bore capillary with a length of 30 m, internal diameter of 0.32 mm and film thickness of 1.8 μm from the GC supplier Chromatographic Service GmbH.

[0636] The ethanol production in the culture has to be induced 1-2 days before the GC online vial experiment is realized by triggering the overexpression of Pdc and Adh. For induction hybrid cells are harvested from liquid cultures by centrifugation and are resuspended in a sterile tube with mBG11 media with additional 50 mM TES pH 7.3, 201 mM NaHCO₃, antibiotics and nitrate until they reached an OD of 2. For the hybrids with nirA promoter the induction is realized by transfer to nitrate containing medium. The clones were incubated on a small shaker at 180 rpm for 48 hours at 28° C. The shaker is aimed with a dimmable light table adjusted to 120 μE (300 μE-0 μE). After 48 h centrifuge the tube at 20° C. for 10 minutes, 4500 rpm and discard the supernatant. The Pellet is resuspended in mBG11 medium suppl. with 50 mM TES pH 7.3, 20 mM NaHCO₃, containing nitrate and no antibiotics. For hybrids under control of copper responsive promoters the induction is realized by addition of 3-6 μM copper, for zinc inducible promoters is the induction is realized by addition of 10 μM zinc sulfate (heptahydrate) and for hybrids with the petJ promoter the induction is done by transfer to copper-free medium. The clones were incubated on a small shaker at 180 rpm for 24-48 hours at 28° C. The shaker is armed with a dimmable light table adjusted to 120 μE (300 μE-0 μE). After 24 h-48 h cells were harvested by centrifugation in a 50 mL Falcon tube at 20° C. for 10 minutes, 4500 rpm and discard the supernatant. The pellet is resuspended in mBG11 medium supplemented with 50 mM TES pH 7.3, 20 mM NaHCO₃, and appropriate metal ions for induction without antibiotics. The sample will be adjusted to an OD₇₅₀ of about 0.7 (+/−0.1) for 4 replicates. 2 mL are filled in 20 mL GC vials equipped with a magnetic stir bar (12 mm) in which the lid is not completely tightened. 5 mL pure carbon dioxide is injected for 1-3 days with the 30 mL syringe through the septum, and then the lid tightly closed (gas tight). The tightly closed GC vials are placed into the headspace auto sampler rack which is temperature controlled at a given temperature for example 37° C. and are analyzed at the same day. After the GC measurements the final OD₇₅₀ is determined for the calculation of the ethanol production rate per average OD₇₅₀. The average cell density for each sample is determined by calculating the arithmetic mean of the optical density at the starting point and the optical density at the end point of the process.

[0637] If necessary, reference samples for the calibration of the gas chromatograph can be prepared as 2 millilitre aliquots with 0.005, 0.01, 0.02, 0.05, 0.1, 0.2, 0.5, 1, 2, 5 and 10 mg/mL ethanol in 35 psu sodium chloride. Reference samples are placed into the same 20 mL sample containers with self-sealing silicon septum caps for headspace autosampling. For each reference sample at least six measurements are applied. After the measurements, the resulting peak areas of the reference samples are used for generating two calibration curves, the first in the concentration range from 0.005 to 0.5 mg/mL ethanol and the second one for the concentration range from 0.5 to 10 mg/mL ethanol. The calibration curves have to fulfill linearity.

[0638] The sample incubation temperature for the GC online measurements in the autosampler is adjusted to a given temperature for example 37° C. The illumination is set at 90 μE to 150 μE, preferably 120 μE. The magnetic stirrer is configured for interval mixing of the samples, with cycles of 2 minutes mixing at 400 rpm, followed by 90 minutes without mixing. An automated process follows, wherein after given periods aliquots of 500 μL of the headspace of the samples are automatically drawn with the gas-tight headspace syringe and injected via the injection port into the gas chromatograph for analysis. Before each headspace autosampling, the mixing is changed for 10 min to continuous mixing with 750 rpm at 37° C. incubation temperature. The syringe temperature is set at 70° C. The fill speed is 250 μL per second, following an initial lag time of 1 second after the septum of the samples has been pierced by the syringe needle. The injection of the aliquot into the gas chromatograph happens with an injection speed of 500 μL per second. Afterwards, the syringe flushes for 3 minutes with air to prevent sample carryover between two injections. The gas chromatograph runtime is 4 minutes and 30 seconds. The injection temperature on the gas chromatograph is 230° C. The column temperature is 60° C. Detection is accomplished with the flame ionization detector at 250° C. process temperature. The makeup gas is nitrogen at 30 mL per minute, the fuel gas is hydrogen at 35 mL per minute and the oxidizer gas is artificial air at 400 mL per minute.

[0639] After the final GC online vial measurement, the final optical density at 750 nm of the samples is measured and average cell density for each sample is determined by calculating the arithmetic mean of the optical density at the starting point and the optical density at the end point of the process divided by two. Afterward, the average ethanol production rate per cell density is calculated.

[0640] In a typical GC online vial experiment for the quantitative determination of acetaldehyde and/or ethanol content in growth media by headspace gas chromatography (GC), the ethanol production of the respective cyanobacterial culture has to be induced 1-3 days prior to the GC measurement to trigger the expression of the pdc and adh production genes. For instance, to repress the PnirA promoter (e.g. in TK225, TK293) hybrids were grown in mBG11 (artificial seawater) depleted of NO₃⁻, with 2 mM Urea and 2 mM NH₄Cl as alternative nitrogen source. To induce the MIA promoter, cells were transferred prior to the GC online vial measurement into mBG11 (artificial seawater salts) with nitrate. For GC measurements cells were harvested from liquid cultures by centrifugation and then resuspended in the appropriate fresh marine medium ensuring that the induction conditions were maintained. The medium was further supplemented with 50 mM TES, pH 7.3 and 20 mM NaHCO₃. The sample was adjusted to an OD₇₅₀ₙₘ of 0.8 and 2 mL samples were then aliquoted per 20 mL GC vial loaded with 4-5 mL pure CO₂ depending on the planned duration of the culture experiment. The tightly closed GC vials were placed onto an illuminated (120 μE m⁻² s⁻¹) headspace auto sampler and were analyzed on the same day on a Shimadzu GC-2010 gas cinematograph equipped with a medium-bore capillary column (FS-CS-624, length 30 m; I.D. 0.32 mm; film 1.8 μm) and a flame ionization detector.

[0641] The culture was stirred once in an hour under constant light (approximately 120 μE) in GC vials (temperature 37° C.) on the GC sampling tray. Acetaldehyde and ethanol content were measured online at four different time points during 40-48 hours. Measurements can be extended up to 72 hours.

[0642] After completion of the GC online vial measurements, the final OD₇₅₀ₙₘ was determined to normalize the ethanol production rate according to the average OD₇₅₀ₙₘ of the bacterial sample. The average OD₇₅₀ₙₘ was calculated as the arithmetic mean of the OD750 nm at the time of sample preparation and the OD₇₅₀ₙₘ after completion of the GC measurement.

[0643] The results of the ethanol quantitation are exemplarily shown in FIG. 47 and e.g. tables 4, 5, and 9. ABICyano1 with TK293 produced a high amount of ethanol (˜0.02% (v/v)/OD*d), which is about 4 fold higher than with plasmidTK225.

### Example 13

### Activity Assay for Pyruvate Decarboxylase Enzyme

[0644] The Pdc enzyme activity assay is a photometric kinetic reaction that can be monitored at 340 mm using a spectrophotometer. Pyruvate is enzymatically converted to acetaldehyde by pyruvate decarboxylase, which is reduced to ethanol by ethanol dehydrogenase under NADH oxidation. The determined Pdc enzyme activity is related to the protein content.

[0645] Spin down 5-15 mL flesh culture material in a 15 mL tube (5,000 g, 10 min, 4° C.). Adapt culture volume to optical density: OD750<1: 20 ml, OD750 1-2: 15 ml, OD750 2-5: 5 ml, OD750>5: 3 mL culture as approximation. Resuspend the pellet in 0.9 mL pre-chilled (4° C.) Purification Buffer (50 mM MES, 100 μM EDTA, 1 mM TPP, 2 mM DTT, 0.025 mg/mL lysozyme). Take 0.9 mL supernatant and add 750 μL pre-chilled glass beads in a 2.0 mL safe-lock Eppendorf tube. Cell disruption is done with the mixer mill (Retsch) for 15 min at 30 Hz. The resulting suspension is incubated at 35° C. for 30 min in a thermomixer. Afterwards the samples are centrifuged (10,000 g, 10 min) and the supernatant is then used for the analysis.

[0646] The PDC enzyme measurement can be done in a photometer or in a plate reader. For the measurement in a cuvette mix 500 μL supernatant sample, 2 μL (15 mg/mL) ADH and 463 μL of Reaction Buffer (1) (43.2 mM MES buffer, 0.43 mM NADH, 10.8 mM CaCl2) in the cuvette. For the measurement in a plate reader mix 20 μL supernatant sample and 173 μL of Reaction Buffer (2) (23.1 mM MES buffer, 0.231 mM NADH, 5.8 mM CaCl2, 0.031 mg/ml ADH) in the plate. Incubate the sample in the spectrophotometer resp. plate reader until a stable baseline is observed (˜200 s).

[0647] Start the reaction by addition of 35 μL 300 mM pyruvate into the cuvette resp. 7 μL in each well of the 96 deep-well plate and record adsorption at a wavelength of 340 nm for 600 s.

[0648] Oxidation of NADH is observed as a decrease of absorbance at 340 nm. Typical values from the bench top PBR are 100-300 nmol·min-1·mg-1-protein.

[0649] For calculating the specific Pdc enzyme activity in the cell extract, the protein amount in the supernatant based on the method Lowry et. al. is determined. For the sample preparation the DOC/TCA precipitation method (DOC=Na deoxycholate, detergent; TCA=trichloroacetic acid) is used.

### Example 14

### Non-Naturally Occurring Ethanologenic ABICyano1 Organisms

[0650] Various embodiments of non-naturally occurring ethanologenic ABICyano1 organisms of the invention disclosed herein are exemplified through the depiction of ethanol production. PDC activity and other characteristics of the non-naturally occurring organisms as exemplified in the following figures.

[0651] FIG. 28 depicts the ethanol production normalized to the growth (OD₇₅₀ₙₘ) determined by the CG vial method for ABICyano1 strains transformed with the plasmids #1606, plasmid #1629 and plasmid #1636 for a period of time of at least 20 days.

[0652] FIG. 29 depicts the specific activity of PDC determined by the CG vial method for ABICyano1 strains transformed with the plasmids #1606, plasmid #1629 and plasmid #1636 for a period of time of about 20 days.

[0653] FIG. 30 depicts the specific activity of ADH determined by the CG vial method for ABICyano1 strains transformed with the plasmids #1606, plasmid #1629 and plasmid #1636 for a period of time of about 20 days.

[0654] FIG. 31 depicts the ethanol production normalized to the growth (OD₇₅₀ₙₘ) determined by the CG vial method for ABICyano1 strains transformed with the plasmids #1606, plasmid #1631 and plasmid #1632 for a period of time of at least 20 days.

[0655] FIG. 32 depicts the specific activity of PDC determined by the CG vial method for ABICyano1 strains transformed with the plasmids #1606, plasmid #1631 and plasmid #1632 for a period of time of at least 20 days.

[0656] FIG. 33 depicts the specific activity of ADH determined by the CG vial method for ABICyano1 strains transformed with the plasmids #1606, plasmid #1631 and plasmid #1632 for a period of time of at least 20 days.

[0657] FIG. 34 depicts the production of ethanol and acetaldehyde determined by the GC vial method from Cyanobacterium sp. ABICyano1 strains containing either one of ethanologenic plasmids TK293 and TK225.

[0658] FIGS. 35A to 35D depict the ethanol production rate, acetaldehyde accumulation and ADH and PDC activities of about a 15 day cultivation of Cyanobacterium sp. ABICyano1 containing the ethanologenic plasmid TK225. Panel A depicts ethanol production (percent ethanol per volume per day) panel B depicts acetaldehyde (percent w/v), panel C depicts PDC enzyme activity over time, and panel D depicts ADH enzyme activity over time.

[0659] FIGS. 36A to 36C depict ethanol production rate, cell growth and maximum ethanol production rate for 7 days from a 14 day cultivation of Cyanobacterium sp. ABICyano1 containing the ethanologenic plasmid TK293.

[0660] FIG. 37 depicts the ethanol production rates and the acetaldehyde accumulation determined by the GC vial method for Cyanobacterium sp. ABICyano1strains variously containing different ethanologenic plasmids TK293, #1495, #1578 and #1581 that were cultivated for 40 hours.

[0661] FIG. 38 depicts and compares (in the left panel) the PDC enzyme activity and (in the right panel) the ADH enzyme activity between ABICyano1 host cells each containing one of the plasmids TK293, #1495, #1578, and #1581.

[0662] In an embodiment, transformed ABICyano1 cells containing ethanologenic cassettes are grown under inducing conditions in mBG11 medium, and may be tested for ethanol production. ABICyano1 containing the plasmids TK293 and TK225 produced 0.086% (v/v) and 0.019% (v/v) ethanol, respectively, over a 50 h period in an online GC vial system (FIG. 34). Cultivation of ethanologenic ABICyano1 cells was performed in 0.5 L round PBR glass vessels containing marine BG11 culture medium. pH was controlled via CO₂ flux. Cell growth and ethanol production are shown in FIG. 35 and FIG. 36 for ABICyano1 containing TK225 and TK293, respectively.

[0663] ABICyano1 organisms variously containing plasmids #1606, #1629 and #1636 with a pdc gene under the transcriptional control of either the native nirA promoter, or modified variants thereof, were cultured in 0.5 L photobioreactors. These enhanced ABICyano1 variously contained plasmids #1606, #1629 and #1636. FIG. 28 shows the ethanol production normalized to growth (OD₇₅₀ₙₘ) as determined by the CG vial method for ABICyano1 transformed with plasmids #1606 (a pdc gene under the control of the native P_{nirA}), plasmid #1629 (a pdc gene under the control of a variant of P_{nirA} with changes in the RBS) and plasmid #1636 (a pdc gene under the control of a modified variant of P_{nirA} with changes in the operator sequence and the TATA box). Ethanol production was measured over a period of at least 20 days after induction. Induction of P_{nirA} was realized by transition of the pre-culture to mBG11 medium containing nitrate for induction at the beginning of the cultivation experiment. FIG. 28 depicts that the normalized ethanol production is higher for ABICyano1 containing the plasmids with modified promoters. FIGS. 29 and 30 depict the specific activity of PDC enzyme and ADH enzyme during the course of cultivation. The inducible, modified nirA promoter variants PnirA*2 (#1629) and (#1636) result in higher activity of PDC enzyme compared to the native promoter (#1606).

[0664] A petJ promoter endogenous to ABICyano1 was identified and further characterized. Expression of P_{petJ} is tightly repressed under high copper (1-3 μM) conditions and induced under copper depletion as depicted in FIG. 39A. An ABICyano1 TK441 strain having the endogenous upstream of an ethanologenic gene cassette produced the same amount of ethanol (percent v/v) under copper depletion conditions as compared to an ABICyano1 TK293 strain grown in marine BG11 (FIGS. 39A and 39B).

[0665] FIG. 31 depicts ethanol production, as determined by the GC vial method, normalized to growth, as represented by absorbance at OD₇₅₀ₙₘ, for ABICyano1 transformed with plasmids #1606 (a pdc gene under the control of the native P_{nirA}), plasmid #1631 (a pdc gene under the control of a modified Pi with modifications in the TATA box) and plasmid #1632 (a pdc gene under the control of a modified P_{corT} with modifications in the TATA box and the RBS). Ethanol production was measured for a period of time of at least 20 days while the cells were cultured in 0.5 L photobioreactors. The value for ethanol production of ABICyano1 transformed with plasmid #1606 is close to the value for ethanol production of ABICyano1 transformed with plasmid #1632. The ethanol production of the ABICyano1 transformed with plasmid #1631 exhibits a lower ethanol production rate than ABICyano1 transformed with plasmids #1606 and #1632, especially in the time period starting from about the tenth day of cultivation.

[0666] FIGS. 32 and 33 depict the specific activity of PDC enzyme and ADH enzyme during the course of cultivation. ABICyano1 transformed with plasmids #1632 and #1606 demonstrated higher activity of PDC enzyme than ABICyano1 transformed with plasmid #1631.

[0667] FIGS. 40, 41 and 42 depict the ethanol production rates of the ABICyano1 transformed with plasmid #1635, or plasmid #1639 or plasmid #1640, respectively. ABICyano1 strains containing plasmid #1635, or plasmid #1639, or plasmid #1640 all include the native P_{smtA} from Synechococcus PCC 7002 as well as modified versions of P_{smtA}. FIGS. 40, 41 and 42 demonstrate that the promoters are repressed in the absence of Zn²⁺ and can be induced upon addition of Zu²⁺.

[0668] Modified vectors such as TK293, and #1536 each containing an ethanologenic cassette and an antibiotic resistance gene under the transcriptional control of an ABICyano1 and/or an endogenous promoter of Synechococcus PCC 7002, respectively, are transformed into Synechococcus PCC 7002 using electroporation, conjugation or natural uptake. The transformants are selected for on an agar plate using the appropriate antibiotic. The putative transformants are then confirmed by PCR analysis. Positive cells are streaked and scaled up to grow as a culture. Ethanol production is measured. By use of this method, ethanol would be produced using a p6.8 derived vector containing an ethanologenic cassette using organisms other than those of the genus Cyanobacterium and/or ABICyano1.

[0669] ABICyano1 Strains containing the following constructs were tested for ethanol production, cell growth, ADH activity, and PDH activity:

[0670] TK293 [p171-6.8_PnirA-zmPDC(opt1)-PrpsL-synADH(opt1)_ter]

[0671] #1495 [p171-6.8_PnirA-zmPDC(opt3)-PrpsL-synADH(opt3)_ter]

[0672] #1578 [p171-6.8_PnirA-zmPDC(opt3)_dsrA-Prbc*(optRBS)-synADH_ter]

[0673] #1580 [p171-6.8_PnirA-zmPDC(opt1)_dsrA-PrpsL-synADH(opt1)_ter]

[0674] #1581 [p171-6.8_PnirA-zmPDC(opt3)_dsrA-PrpsL-synADH(opt3)_ter]

[0675] #1601 [p171-6.8_PnirA-zmPDC(opt1)_dsrA-Prbc*(optRBS)-synADH(opt3)_ter]

[0676] #1606 [p171-6.8_PnirA-zmPDC(opt1)_dsrA-Pibc*(optRBS)-synADH(opt1)_ter]

[0677] TK411 [p171-6.8_PnirA-zmPDC(opt3)-PrpsL-synADH(opt1)_ter]

[0678] TK412 [p171-6.8_PnirA-zmPDC (opt1)-PrpsL-synADH (opt3)_ter]

[0679] As depicted in FIG. 43, different variations of the components of the ethanologenic gene cassette were created. In an embodiment, one of the resulting constructs #1578 resulted in an improved ethanol production rate compared to TK293. Construct #1578 included the zmpdc gene with a third version of codon-optimization, an additional introduced transcriptional terminator dsrA, and the native synadh gene whose expression is controlled by the artificial rbc*(optRBS) promoter which is an improved variant of the rbcL promoter derived from Synechocystis PCC 6803.

[0680] FIG. 44 depicts cell growth, ethanol production and normalized ethanol production of ABICyano1 with TK293 or #1578. FIG. 45 depicts PDC and ADH activity in ABICyano1 with TK293 or #1578. FIG. 46 depicts overlays of the curve progression in regard to cell growth, overlays of the cline progression in regard to ethanol production, overlays of the curve progression in regard to the ethanol production rate and a comparison of the PDC and ADH activity between ABICyano1 #1578 and ABICyano1 TK293. As depicted in FIGS. 44 to 46, both components in combination with the additional terminator in between both genes result in an increased PDC as well as ADH activity over time which consequently lead to a higher ethanol production rate and at the same time reduced growth rate. This observation indicates a higher carbon-partitioning (amount of carbon fixed into ethanol versus not fixed into ethanol) for strain ABICyano1 #1578 compared to ABICyano1 TK293 and demonstrates the high potential of optimizing the ethanologenic gene cassette in order to improve the ethanol productivity for ABICyano1 and other cyanobacteria.

[0681] As depicted in FIG. 38, ADH expression is controlled by promoter PrpsL. The expression level of the synADHopt3 cassette present in #1495 and #1581 is apparently less efficient compared to the expression level of the synADHopt1 present in ABICyano1 TK293 and ABICyano1 #1580. Not being limited by theory, this might be explained by the different codon-usage strategy applied for the synADHopt1 gene version as exemplified through testing constructs TK411 and TK412, comprising synADHopt1 and synADHopt3 respectively. TK411 exhibited a similar ADH activity as TK293 Whereas TK411 revealed a relatively low ADH activity. This low ADH activity detected for TK412 was accompanied with an elevated acetaldehyde accumulation as found previously for #1495 and #1581, both with synADHopt3. This clearly demonstrates the better performance of synADHopt1 in relation to synADHopt3.

[0682] Furthermore, analyses of ADH activity from ABICyano1 strains #1601 and #1606 confirmed the different efficiency when using synADHopt3 vs. synADHopt1. Strain #1601 [p171-6.8_PnirA-zmPDC(opt1)_dsrA-Prbc*(optRBS)-synADH(opt3)_ter] exhibited a relatively low ADH activity and consequently a higher acetaldehyde accumulation in GC vial assay whereas the experiments with strain #1606 [p171-6.8_PnirA-zmPDC(opt1)_dsrA-Prbc*(optRBS)-synADH(opt1)_ter] indicated a higher ADH activity in relation to #1601 and thus a lower acetaldehyde accumulation. Nevertheless, the highest activity found for the different gene variants of synADH was surprisingly accomplished by the native synADH (ABICyano1 #1578) without any codon-optimization for use in ABICyano1. Codon optimization is usually needed for efficient protein expression in ABICyano1 because it has a strong AT bias in endogenous codon-usage.

[0683] As depicted in FIG. 47, although strains ABICyano1 #1495 and ABICyano1 #1581 differ in the dsrA terminator downstream from the pdc gene, the PDC expression in ABICyano1 #1581 was found to be substantially increased. This is an indication that introduction of an efficient transcript termination signal apparently results in a higher and/or more stable mRNA levels and consequently in an increased PDC protein expression. In ABICyano1 #1578 growth is thereby reduced but the ethanol production is significantly increased demonstrating that the improved PDC expression results in an improved relative production of ethanol in comparison to biomass.

[0684] The data depicted in table 5 demonstrate the improved when compared to TK293) production rate of ethanol as well as the elevated PDC and ADH activities for ABICyano1 that has been genetically enhanced with construct #1578. The cultivation of the corresponding cell lines was performed in 0.5 L Crison PBR round bottles illuminated from two sides with 450 μE m⁻² s⁻¹ (900 μE m⁻² s⁻¹ total) for 36 days including two dilution steps. During this long-term cultivation the OD, the chlorophyll content, and the ethanol amount were measured.

[0685] As depicted in FIG. 47, the introduction of alterations in the ethanologenic gene cassette resulted in improved expression and improved activity of PDC and synADH. The alterations enhanced ethanol productivity in ABICyano1 by about 20-25%. While not being limited by theory, FIG. 48 depicts the higher ethanol production rate and lower growth for ABICyano1 #1578 as compared to TK293 and shows that PDC may regulate the partitioning of carbon fixed by photosynthesis into biomass and ethanol. ABICyano1 #1578 this increases total carbon fixation and ethanol production by about 10% compared to ABICyano1 TK293.

[0686] FIG. 49 depicts ethanol production in several ABICyano1 strains including copper-inducible promoters controlling the pdc expression. As depicted in FIG. 49, strainTK483 which contains P_{orf0221} strain TK487 and strain #1772 which both contain P_{orf0316} produce more ethanol over the same amount of time than does strain TK293 that contains a P_{nirA} promoter controlling the pdc expression. All of the strains depicted in FIG. 49 were cultivated in a vPBR system at 230 μE*m⁻²*s⁻¹ in a 12 h/12 day/night cycle.

[0687] As depicted in table 6 and the following figures, promoters controlling the open reading frames found to be regulated by addition of the respective metal ions (and verified by qPCR), were chosen to be used in constructs for ethanol production in ABICyano1. A 300-500 bp fragment upstream of each start codon was selected and cloned into plasmid #1646, replacing the nirA promoter, in order to drive pdc transcription. ABICyano1 transformants were tested for ethanol productivity under repressed and induced conditions in GC vial experiments. FIG. 50 depicts the ethanol production of ABICyano1 TK293 (p171-6.8::PnirA-PDC(opt1)-PrpsL-synADH(opt1)_ter) compared to ABICyano1 TK483 (p171-6.8::Porf0221-zmPDC_(opt1)dsrA-Prbc*(optRBS)-ADH111(opt)_ter) in the presence and absence of 3 μM Cu²⁺. In the absence of copper, ethanol production rates are very low, indicating the tightness of Porf0221. By contrast, ethanol production of ABICyano1 TK483 in the presence of 3 μM Cu²⁺ is even higher compared to ABICyano1 TK293.

[0688] The ethanol productivity (EtOH(v/v)/OD/day) of each construct is shown in table 6 under repressed (without the respective metal ion) and induced conditions (10 μM Ni, 15 μM Zn²⁺, 3 μM Cu²⁺ or 5 μM Co²⁺). Tightness and strength of each promoter were also rated with a +/− scale, (see legend below Table 3). In an embodiment, ethanol production rates of all tested promoters can be divided into different categories as follows: 1) ethanol productivity was very low, even under inducing conditions (e.g. TK500), 2) ethanol productivity was quite high, however, the promoter was not repressible (e.g. TK501) and 3) ethanol productivity was quite high and promoter repressible/inducible (e.g. TK4S3). In some cases two constructs were generated for one promoter (e.g. TK493/TK527 for Porf0128), as two putative start codons for the respective gene could be deduced.

[0689] Ethanol producing ABICyano1 host cell strains carrying the Zn²⁺ inducible constructs TK480 and TK490 as well as the Cu²⁺ inducible TK483, TK487 and TK504 were analyzed for tightness of promoter control of the expression of ethanologenic genes. All five constructs are very tightly repressed under appropriate conditions (lack of inducer metal) and led to high ethanol production rates after metal ion addition. TK480 uses mntC promoter, which was shown in Synechocystis PCC 6803 to be regulated by manganese (Ogawa et al., 2002). Hence repression by addition of Mn²⁺ was tested, see table 6, and addition of 40-50 μM Mn²⁺ led to a repression.

[0690] Thus, orf0221 encodes for a putative multi-copper oxidase (copper-resistance protein), while orf0223 and orf0316 are hypothetical genes with unknown function. All three genes/proteins are believed to have not been previously described in the literature, induction by copper was not known. Based on homology to other copper regulated genes, none of the three endogenous promoters from ABICyano1 would have been chosen to control pdc expression. However, the three promoters respond strongly to copper and were shown to tightly control ethanol production in ABICyano1. Because the response to copper declines within about 5 days, additional copper needs to be supplemented during long term ethanol production experiments. In an embodiment, the copper repressible promoter of petJ (orf3461) is useful. No ethanol production was observed with the promoter of orf3232, encoding for a heavy metal ATPase. As the copper response stayed at a constant level up to about day 5, the promoter of orf3232 could be useful for longer productivity. Not being bound by theory, one explanation is that both cloned translational start codons are selected in the upstream region of about 500 bp and might not use the entire functional promoter.

[0691] The Zn²⁺ responding promoter of the smtA like orf3126 improved amounts of produced ethanol. However, basal (repressed) production rates were too high. Additional genetic optimization could enhance the genetic stability. By contrast, the Zn²⁺ responding promoter of the manganese transporter operon (mntABC) is repressed by addition of 40 μM Mn²⁺.

[0692] At least three Cu²⁺ responding (Porf0221, Porf0223 and Porf0316) and two Zn²⁺ responding promoters (Porf1071 and Porf3126) are useful as promoters to chive pdc expression ABICyano1 ethanologenic strains.

[0693] FIGS. 59 to 66 depict the ethanol production of various different ABICyano1 strains carrying different metal-inducible promoters upstream of the pdc gene determined by the GC online vial method.

[0694] FIG. 59 depicts the ethanol production of Cyanobacterium sp. ABICyano1 containing the plasmid TK480 wherein a codon improved variant of a gene coding for the native PDC enzyme is under the transcriptional control of the promoter mntC (orf1071) from ABICyano1, whereas the adh with the nucleotide sequence shown in FIG. 52 (nucleotides 2390 to 3406 of SEQ ID NO: 60) is under the control of a variant of the native rbc promoter from ABICyano1 with an improved ribosomal binding site (RBS). Furthermore, the ethanol production of Cyanobacterium sp. ABICyano1 containing the plasmid #1770 is depicted in FIG. 59, which is comparable to the ethanol production of Cyanobacterium sp. ABICyano1 with the plasmid TK480. This plasmid #1770 only differs from plasmid TK480 by replacing the Adh enzyme of FIG. 52 (nucleotides 2390 to 3406 of SEQ ID NO: 60) with the Synechocystis Adh enzyme. It can clearly be seen that upon addition of 10 μM Zu²⁺ the ethanol production increased compared to the uninduced state with Zn²⁺ and 15 μM Mn²⁺ (repression by the absence of Zn²⁺ and presence of Mn²⁺) for both strains transformed with the plasmids #1770 and TK480, respectively. The ethanol production of Cyanobacterium sp. ABICyano1 including the plasmid TK488 after addition of 15 μM Zn²⁺ is shown in FIG. 60 in comparison to the uninduced state without Zn²⁺. Addition of Zn²⁺ leads to a nearly 4-fold increase in ethanol production.

[0695] The ethanol production of Cyanobacterium sp. ABICyano1 containing the plasmid TK489 is depicted in FIG. 61. This graph shows a continuously rising ethanol production with increasing cultivation time in the induced state upon addition of 15 μM Zn²⁺. However under uninduced conditions a high ethanol production can also be observed, which shows that this promoter is not very tight.

[0696] FIG. 62 depicts a graph evidencing the ethanol production in ABICyano1 transformed with the plasmid TK490 including a codon improved variant of pdc gene under the transcriptional control of the promoter controlling the open reading frame (ORF) 3126 versus the ethanol production of the same strain transformed with the plasmid #1773. This plasmid differs from TK490 only in the Adh enzyme which is Synechocystis Adh for #1773 versus the adh with the sequence of FIG. 52 (nucleotides 2390 to 3406 of SEQ ID NO: 60) in TK490. Both ABICyano1 strains have a comparable ethanol production up to 40 hours of cultivation, but the ethanol production appears to be higher for #1773 after 40 hours compared to TK490. A clear increase in ethanol production can be observed upon induction by 15 μM Zn²⁺ for both strains transformed with #1773 and TK490. A clear rise in ethanol production can also be seen upon induction with Cu²⁺ in Cyanobacterium sp. ABICyano1 transformed with the plasmid TK487 and the plasmid #1772 (see FIG. 63). TK487 includes a codon improved variant of the Zymomonas mobilis gene coding for PDC under the transcriptional control of the promoter controlling the ORF0316 and codon improved variant of the gene coding for ADH with the nucleotide sequence shown in FIG. 52 (nucleotides 2390 to 3406 of SEQ ID NO: 60 under the transcriptional control of Prbc with an improved RBS. The plasmid #1772 contains a gene coding for Synechocystis ADH instead of the ADH with the sequence of FIG. 52 (nucleotides 2390 to 3406 of SEQ ID NO: 60). Induction with copper leads to an increase in ethanol production for both ABICyano1 strains. The ethanol production increases in comparison to the uninduced state upon addition of 0.3 μM Cu²⁺ and further increases, when both strains are induced with 6 μM Cu²⁺. A clear rise in ethanol production can be observed by copper induction in ABICyano1 with strains containing the plasmids TK483 and #1771 upon addition of 0.3 μM and 6 μM Cu²⁺ (see FIG. 64).

[0697] Table 8 depicts ethanol production data of ABICyano1 strains containing plasmids with genes coding for PDC under the control of endogenous inducible promoters.

[0698] As depicted in FIG. 67, copper-inducible strains such as #1771 (P_{orf0221}), #1772 (P_{orf0316}) and #1774 (P_{orf0223}) as well as a zinc-inducible strain #1770 (P_{mntC}) exhibit a higher ethanol productivity than a nitrate inducible strain TK293 that uses a PnirA promoter. Induction protocols use initial Cu²⁺ addition and also further Cu²⁺ additions. As depicted in FIG. 68, the PDC activity of strains #1770, #1771, #1772 and #1774 were greater than TK293. The strains depicted in FIGS. 67 and 68 cultivated in a vertical photobioreactor (vPBR) at 200 μE*m⁻²*s⁻¹ in a 12 h/12 day/night cycle.

[0699] Initial induction with 1.6 μM Cu²⁺ (which is about five times the Cu²⁺ concentration of BG11) in all four treatments of TK487 for ethanol production is depicted in FIG. 69 and for cell growth of TK487, in FIG. 70. TK487 is identical to #1772 (P_{orf0316}), except for a different adh gene. PDC activity in TK487 is depicted in FIG. 71. Ethanol per cell density of induced TK487 is depicted in FIG. 72. Weekly and hi-weekly (day 7 and 21) copper addition results in the highest tested ethanol production and lowest biomass accumulation.

[0700] Table 9 depicts the ethanol production data for various ABICyano1 strains including strains and plasmids, #1578/#1646, #1658/#1684, #1658 FIG. 118 (SEQ ID NO 72), #1663 FIG. 119 (SEQ ID NO: 73), #1697/#1665, #1697 FIG. 120 (SEQ ID NO: 74), TK480/#1770, TK483/#1771, TK487/#1772, TK490/#1773, and TK504/#1774.

[0701] FIG. 28 depicts the ethanol production normalized to the growth (OD₇₅₀ₙₘ) determined by GC single measurements for ABICyano1 strains transformed with the plasmids #1606 (pdc gene under the control of the native PnirA), plasmid #1629 (pdc gene under the control of a modified variant of PnirA with changes in the RBS) and plasmid #1636 (pdc gene under the control of a modified variant of PnirA with changes in the operator sequence and the TATA box) for a period of time of at least 20 days after induction was realized by transition of the pre-culture to usual mBG11 medium (containing nitrate for induction) at the beginning of the cultivation experiment. The graph depicts that the normalized ethanol production is higher for the strains including the plasmids with the modified promoters. FIGS. 29 and 30 depict the specific activity of PDC and ADH during the course of the above mentioned cultivation. As depicted in FIGS. 29 and 30 the inducible modified nirA promoter variants PnirA*2 (#1629) and PnirA*3 (#1636) result in a higher activity of PDC enzyme compared to the native promoter (#1606).

[0702] FIG. 31 depicts the ethanol production normalized to the growth (OD₇₅₀ₙₘ) determined by the GC single measurement method for ABICyano1 strains transformed with the plasmids #1606 (pdc gene under the control of the native PnirA), plasmid #1631 (pdc gene under the control of a modified PcorT with modifications in the TATA box) and plasmid #1632 (pdc gene under the control of a modified PcorT with modifications in the TATA box and the RBS) for a period of time of at least 20 days cultured in 0.5 L photobioreactors. The ethanol production of the strain transformed with the plasmid containing the native PnirA with pdc gene is comparable to the ethanol production of the strain containing the plasmid with the pdc gene controlled by the modified corT promoter variants PcorT*3 (#1632) with modifications in the TATA box and RBS, whereas the ethanol production of the strain containing the plasmid with PcorT with modifications only in the TATA box PcorT*2 (#1631) exhibits a lower ethanol production rate, especially in the time period starting from the tenth day of cultivation on.

[0703] FIGS. 32 and 33 depict the specific activity of PDC enzyme and Adh enzyme during the course of the above mentioned cultivation. The strains with the native PnirA as well as the PcorT with modifications in the TATA box and the RBS show higher reactivity of PDC enzyme than the other strain.

[0704] FIGS. 40 to 42 depict the ethanol production rates of the ABICyano1 strains transformed with the plasmids #1635, #1639 and #1640 including the native PsmtA, promoter from Synechococcus PCC 7002 as well as modified versions of PsmtA. It can clearly be seen that all promoters are repressed in the absence of Zn²⁺ and can be induced upon addition of Zn²⁺.

[0705] FIG. 81 depicts the activity of PDC enzyme in the uninduced state and after 72 hours of induction for ABICyano1 strains transformed with the plasmids #1578, #1701, #1658, #1697 and #1663, including an unmodified endogenous nirA promoter (plasmid #1578), and four different modified nirA promoter variants PnirA*1 (plasmid #1701), PnirA*2 (plasmid #1658), PnirA*3 (plasmid #1697) and PnirA*4 (plasmid #1663). Cultivation of those ethanologenic hybrids was performed in GC vials for 72 hours. The Pdc activity after induction is indicated by the blue bars whereas the much lower activity of Pdc enzyme in the repressed state is given by the red bars. The induction factors for these plasmids #1575, #1701, #1658, #1697 and #1663 are 12, 10, 14, 8, and 7 times the Pdc activity in the induced state vs. the repressed state. This figure depicts that specific nucleotide changes introduced into the ribosomal binding site and/or the promoter region of the nirA promoter in the respective variants PnirA*1, PnirA*2, PnirA*3 and PnirA*4 increased the expression level of the PDC in the induced state, but had relatively little impact on the tightness of the modified promoter in the repressed state.

[0706] FIGS. 82 and 83 depict the activity of PDC and their respective OD₇₅₀ₙₘ-normalized ethanol production (% EtOH per OD₇₅₀ₙₘ) during the course of a 29 day cultivation grown at 125 μE*m⁻²*s⁻¹ in a 12 h/12 day/night cycle for the above mentioned strains of FIG. 81 except for #1701 which was omitted. The Pdc activity of #1697 (PnirA*3) and #1663 (PnirA*4) is higher and more stable over time than that of #1578 (PnirA) and #1658 (PnirA*2). Therefore the ratio of carbon distribution into ethanol and biomass (EtOH/OD ratio) is thereby higher and appears to be more stable over time for the transformants. FIGS. 84 and 85 depict the OD₇₅₀ₙₘ, and the ethanol production in % (v/v) of this about 30 day cultivation grown at 125 μE*m⁻²*s⁻¹ in a 12 h/12 day/night cycle. ABICyano1 strains transformed with plasmids #1578 (PnirA) and #1658 (PnirA*2), show a similar ethanol production rate over about 29 days.

[0707] FIG. 86 depicts ADH and PDC activity in TK293, 1578 and 1792. FIG. 87 depicts total ethanol production in TK293, 1578 and 1792. FIG. 88 depicts ethanol production per OD in TK293, 1578 and 1792. TK293 is p171-6.8::PnirA-zmPDC(opt1)-PrpsL-synADH(opt1)_ter; #1578 is p171-6.8::PnirA-zmPDC(opt3)dsrA-Prbc*(optRBS)-synADH_oop; #1749 is p171-6.8::PnirA-zmPDC(opt3)dsrA-PrpsL*4-synADH_oop; and #1751 is p171-6.8::PnirA-zmPDC(opt3)dsrA-PcpcB-synADH_oop.

[0708] ABICyano1 containing plasmid #1792 results in improved synADH expression and shows better and more stable ethanol production under standard conditions. As depicted in FIGS. 89-91, increased ADH activity prevents PDC inactivation. FIG. 89 depicts acetaldehyde accumulation of TK293, #1578, 41749, and #1792. FIG. 90 depicts ADH activity in TK293, #1578, #1749, and #1792. Conversely, acetaldehyde exposure during cultivation reduces PDC activity. Thus, there is an inverse relationship between ADH activity and acetaldehyde accumulation for different synADH expressing strains in GC vial assay. FIG. 91 depicts specific PDC activity in varying amounts of acetaldehyde. Acetaldehyde is completely consumed within 1-2 hours.

[0709] Higher ADH activity helps to prevent PDC inactivation. A decrease in PDC activity was detected for several strains with very low ADH activity (in spite of identical PDC cassettes). FIG. 92 depicts ADH activity and FIG. 93 depicts PDC activity with or without the addition of acetaldehye (3 mM for 5 hours) for strains TK293, #1578, #1749, and #1751 each having different ADH activity levels.

[0710] ABICyano1 ethanologenic pdc/adh cassettes useful for extended production of ethanol in a ABICyano1 host cell include #1578 (p171-6.8::PnirA-zmPDC(opt3)_dsrA-Prbc*(optRBS)-synADH_oop); #1728 (p171-6.8::PnirA-zmPDC(opt3)_dsrA-PcpcB-ADH111(opt)_ter); and #1749 (p171-6.8::PnirA-zmPDC(opt3)_dsrA-PipsL*4-synADH_oop).

[0711] The expression of heterologous adh genes from other cyanobacterial species that have been improved for codon usage patterns in ABICyano1 resulted in increased ADH activity. FIG. 94 depicts ADH activity of various expressed adh genes, some of which were codon improved for expression in ABICyano1. ADH242 is derived from Arthrospira platensis and ADH111 is derived from Lyngbya species. Constructs #1646 and #1754 had codon improved adh genes for ADH111 and ADH242, respectively. As depicted in FIG. 94, codon improvement for expression in ABICyano1 for the genes encoding for ADH111 and ADH242 resulted in an increase in ADH activity by about 30% to about 50%.

[0712] Increased ADH activity results in resistance to decreased ethanol production resulting from higher ethanol concentrations iii the growth media. FIG. 95 depicts the effect of ethanol productivity of various ethanologenic ABICyano1 strains in growth media containing 1% vol/vol ethanol. As depicted in FIG. 95, the difference between the production rate of ethanol in growth media containing no added ethanol and growth media containing 1% added ethanol is less when the expression of ADH is higher. FIG. 95 depicts the daily ethanol production rate in percent vol/vol per day over 10 days as measured from ABICyano1 strains illuminated with 250 μE*m^{-2*}s⁻¹ in 12 h/12 day/night cycles. As is depicted in FIG. 95, the stronger the ADH activity the less the impact of higher ethanol concentrations on ethanol production. As depicted in FIG. 95, ABICyano1 strain #1803 that expresses ADH from Microcystis aeruginosa exhibits less of a decrease in ethanol productivity (7% less) in a 1% ethanol growth solution when compared to the decrease in ethanol productivity of strain #1792 expressing ADH from Synechocystis PCC 6803 (39% less).

[0713] Ethanol production from ABICyano1 strains each containing a different adh gene operably linked to an endogenous ABICyano1 cpcB promoter and each strain containing a nirA promoter operably linked to pdc expression is depicted in FIG. 96. FIG. 96 also depicts the production of ethanol from strain TK293 (p171-6.8_PnirA-zmPDC(opt1)-PrpsL-synADH(opt1)_ter). Each strain depicted in FIG. 96 was cultivated in a vPBR system with exposure to light at 230 μE*m-2*s-1 in a 12 h/12 day/night cycle. As depicted in FIG. 96, the ethanol production of ABICyano1 strains 1790, 1791, 1792, 1793, 1794, and 1795 was greater than that of TK293 after about day 10 to about day 31 of growth.

[0714] ABICyano1 host cells transformed with ethanologenic vectors that contain more than one pdc gene demonstrated an increased duration of ethanol production. Induction of a second pdc gene increases PDC activity by about 2.5 times when compared to the induction of only a single pdc gene. Induction of a more than one pdc gene results in an increase in ethanol production and a decrease in cell growth. Thus ethanol production per OD₇₅₀ is higher for #1743 when both pdc genes are active. FIG. 97 depicts the PDC activity in strain #1743 with and without induction of 6 μM copper at about day 16 and the additional induction with 5 μM copper at about day 30. FIG. 98 depicts the total ethanol production of strain #1743 with and without the induction of copper. FIG. 99 depicts total ethanol per cell density measured at OD₇₅₀.

[0715] Dual pdc genes are introduced into an ABICyano1 host cell either on an integrative plasmid or on a replicative plasmid. Thus, the dual pdc genes, and other components of the ethanologenic cassette; can be integrated into the genome of ABICyano1 and/or exist on a plasmid within the ABICyano1 host cell. Strain #1743 is an ABICyano1 host cell containing a recombinant plasmid #1743 (pABIcyano1-PnirA-zmPDC(opt3)dsrA-Prbc*(optRBS)-SynADHoop-Porf0221-zmPDC(opt1)dSrA) whose plasmid map is depicted in FIG. 156 and has a sequence that is depicted in SEQ ID NO: 106. Strain #1743 has two independently inducible pdc copies where one pdc gene is inducible by nitrate and the other pdc gene is inducible by copper. Strain #1743 was analyzed for PDC activity in comparison to the corresponding single pdc strains #1578 (pdc under control of promoter PnirA) and #1771 (pdc under control of promoter Porf0221). The analyses revealed independently inducible expression of both pdc genes from one construct. Without nitrate and copper addition, the pdc genes of strain #1743 were as tightly repressed as the single pdc strains #1578 and #1771. Long-term cultivation experiments using a copper inducible pdc construct resulted in increased PDC expression when compared to other inducible pdc constructs such as nitrate inducible pdc constructs.

[0716] The second pdc gene of strain #1743 was induced at day 16 of cultivation in a photobioreactor (at an OD₇₅₀ of about 5.5) by addition of Cu²⁺. Strain #1744 having two pdc genes under control of PnirA and Porf3126 (Zn²⁺) was also induced at day 16 of cultivation in a photobioreactor (at an OD₇₅₀ of about 5.5). The PDC activity in each strain increased to a value of about 5-6 μmol/mg*min in comparison to a value of about 2.5 μmol/mg*min for the control replicates without copper addition. Ethanol production increased about 10-15% at day 37 of cultivation. Additionally, the ethanol to OD₇₅₀ ratio increased.

[0717] The growth of strain #1743 containing two pdc genes, one pdc gene operably linked to a nirA promoter and a second pdc gene operably linked to a endogenous copper-inducible promoter Porf0221, is analyzed by measuring absorption at OD₇₅₀ of the growth media after induction of the copper-inducible promoter Porf0221. As depicted in FIG. 100, the addition of copper at day 19, 48 and at about day 108 caused a slight decrease in the rate of growth of ABICyano1 strain #1743 when compared to the control lacking copper in the growth media. As depicted in FIG. 101, the production of ethanol from strain #1743 was measured in the same growth media as depicted in the OD₇₅₀ measurements of FIG. 100. In an embodiment, as depicted in FIG. 101, the overall ethanol production increased when copper was added to the growth media at days 19 and 48. In another embodiment, PDC activity from strain #1743 was measured over about 115 days of growth. FIG. 102 depicts the PDC activity in ABICyano1 strain #1743 cells from growth media over the course of about 115 days. The growth media was diluted at about days 48, 78 and 106 of growth. In another embodiment, the total ethanol produced per cell density was measured. As depicted in FIG. 103, strain #1743 was grown for about 115 days and was diluted at about days 48, 78 and 106 of growth and amount of ethanol in percent volume per volume per OD₇₅₀ was measured. As depicted in FIG. 103 the induction of the pdc gene by introduction of copper into the growth media results in an increase in the amount of ethanol produced per OD₇₅₀ of ABICyano1 strain #1743 when compared to the ABICyano1 strain #1743 grown in media lacking copper.

[0718] Table 12 depicts a further list of plasmids for used for transformation of ABICyano1 with ethanologenic cassettes and also depicts the ethanol production in ABICyano1 host cells created thereby.

TABLE 12

| | | % ethanol | Relative |
|---|---|---|---|
| Strain | Genotype | [v/v]/day | % |
| TK293 | pABICyano1-6.8::PnirA- | 0.0135 | 100 |
| n = 7 | zmPDC(opt1)-PrpsL171- | | |
| | synADH171(opt1)_ter | | |
| #1578 | pABICyano1-6.8::PnirA171- | 0.0169 | 125 |
| n = 2 | zmPDC171(opt3) dsrA- | | |
| | Prbc*(optRBS)-synADH_oop | | |
| TK483 | pABICyano1-6.8::Porf0221- | 0.0173 | 128 |
| n = 3 | zmPDC171(opt1)dsrA- | | |
| | Prbc*(optRBS)- | | |
| | ADH111(171opt)_ter | | |
| TK487 | pABICyano1-6.8::Porf0316- | 0.0177 | 131 |
| n = 6 | zmPDC171(opt1)dsrA- | | |
| | Prbc*(optRBS)- | | |
| | ADH111(171opt)_ter | | |
| #1772* | pABICyano1-6.8::Porf0316- | 0.0168 | 124 |
| n = 3 | zmPDC171(opt1)-dsrA- | | |
| | Prbc*(optRBS)-synADH_oop | | |
| #1790 | pABICyano1-6.8::PnirA171- | 0.0175 | 130 |
| n = 4 | zmPDC171(opt3) dsrA- | | |
| | PcpcB171- | | |
| | ADH242(171opt)_trbcS | | |
| #1791 | pABICyano1-6.8::PnirA171- | 0.0192 | 142 |
| n = 4 | zmPDC171(opt3) dsrA- | | |
| | PcpcB171- | | |
| | ADH111(171opt)_trbcS | | |
| #1792 | pABICyano1-6.8::PnirA171- | 0.0174 | 129 |
| n = 4 | zmPDC171(opt3) dsrA- | | |
| | PcpcB171-synADH_trbcS | | |
| #1793 | pABICyano1-6.8::PnirA171- | 0.0198 | 147 |
| n = 4 | zmPDC171(opt3) dsrA- | | |
| | PcpcB171- | | |
| | Adh916(171opt)_trbcS | | |
| #1794 | pABICyano1-6.8::PnirA171- | 0.0194 | 144 |
| n = 2 | zmPDC171(opt1) dsrA- | | |
| | PcpcB171- | | |
| | ADH1520(171opt)_trbcS | | |
| #1795 | pABICyano1-6.8::PnirA171- | 0.0176 | 130 |
| n = 4 | zmPDC171(opt1) dsrA- | | |
| | PcpcB171- | | |
| | ADH553.2(171opt)_trbcS | | |

[0719] Articles, patents and other published literature referred to herein is incorporated by reference. Although the present disclosure has been described in considerable detail with reference to certain embodiments thereof, other embodiments are possible. Therefore, the spirit and scope of the appended claims should not be limited to the description of the embodiments contained herein.

The application's sequence listing, which the Patent Office published only in electronic form, follows.

SEQUENCE LISTING (128 sequences)

SEQ ID NO: 1 - DNA, 6828 bp, Cyanobacterium sp. ABICyano1
aatatttttcgtcagatacgcaaaccttacaaacataattaacaactgaaactattgatatgtctaggttttagctctatcacaggttgttagacaccctgtcatgtattttatattatttatttcaccatacggattaagtgaaacctaatgaaaatagtactttcggagctttaactttaatgaaggtatgtttttttatagacatcgatgtctggtttaacaataggaaaaagtagctaaaactcccatgaattaaagaaataacaaggtgtctaacaacctgttattaagaatgttagaaaagacttaacatttgtgttgagtttttatagacattggtgtctagacatacggtagataaggtttgctcaaaaataaaataaaaaaagattggactaaaaaacatttaatttagtacaatttaattagttattttttcgtctcaaattttgctttgttgagcagaaatttagataaaaaaatccccgtgatcagattacaatgtcgttcattgtacgatgtgtcgaaaaatctttacgacactctaaactgaccacacgggggaaaaagaaaactgaactaataacatcatgatactcggaaaacctagcaattctcaacccctaaacaaaagaaacttccaaaaccctgaccatataaaggagtggcaacaatcagcaatcagtcaagatttgatagcagaaaatcttgtatcggttgctaatggttttgatgtactatttatcggcaataaataccgaactaacacgggtgttctgtcacggcacatattaaactcctattctcatttagaagatggtggttcgtatggtagaacatttgacccatttaccaataaagaaatgcagtgggttcaatttaaaccgaatagaccaagaaaaggttctactggtaaggtaatcaaatatgaatcgccaaaaggtgaacctacaagagttctaatgccgtttgtgcctatgaaaatatggcaacggattagcgataagttcggagtaccgattaatccgaaaaaagatactcacttttgggaatgggtaaagaataatccatcgataccgattgccattacagaaggaaataaaaaagctaattgcctattatcctatggctatcctgctattgcctttgtaggcatttggaacggattagagaaaataaatgatttctcgaaggaaaagcagttaaaagaggatttgaaatggttgttatccaacggcaaccgaaatattaatatcatctttgaccaagaccagaaacaaaaaactgtaattaatgtaaacaaagctattttcgctttatcttctctaataagtagaaatggtcataaagttaatattgtgcaatggttgccgtcaaaaggtaaaggaatagatgattatttggtagctttaccttttgagaaaagagaaaatcatttagacaacttaattaaaattgcaccatcatttaatttttggtcaactaaatacttattcaagtgtcgtaaaccagatttaaccgtaaattgccgttatttgagcgatgcagtaaaagaattacctcaagaggatatagcattaatagcacctcacggcacgggtaaaacttcattagtagctactcacgttaagaatcggagttatcacggaaggaaaactatttcattggtgcatcttgaaagtttagccaaagctaatggcaacgcacttggattatattaccgaaccgaaaataatattgaaaagcaatatcttggatttagcttatgtgtagatagttgccgtgataagattaacggcattacaactgatattatttcaggtcaagattattgccttttcattgatgaaattgaccaagtaattccacacatccttaacagtgaaactgaagtaagtaagtatagatgcaccatcattgacactttttctgaactggtgagaaatgctgaacaggtcattattgctgatgctgatttatccgatgtgacgattgacctaatagaaaacatcagaggtaaaaaactatatgtaatcaagaatgaatatcagtatcagggaatgacttttaacgccgttggttcaccattagaaatgatggcaatgatgggaaaatcggtgtcagaaggcaagaaattatttattaacaccacatcccaaaaggcaaaaagtaagtacggcacaatcgctcttgagtcttatatttttggtctaaataaagaagcaaagatattaagaatagactctgaaaccactaaaaaccctgaacatccagcctataaaatcattgaccaagacttaaataatatcctcaaagattatgattatgtcattgcctcaccttgccttcaaacaggtgtcagtattaccttaaaagggcattttgaccagcaatttaacttttccagtggaaacattacacctcattgctttttacagcaaatgtggcggttgagggatgcagaaattgaaagattctattatgtgccgaactcatctaacctcaatctcattgggaataagtcaagttcaccatcagaccttctaaagagcaataacaagatggcaacggcaacggttaaccttttgggtagaatcgactccgaatattccctagagtatgaatcgcacggcatttggcttgagacgtgggcaaaattatcagcacggcataacagttcaatgcgttgttactctgaaattcttacctatctaattacgtctcaagggcataaattaaatatcaacattccctcacctcttgcagatattaagaagctaaatgatgaggtaagtagtaacagggaaaaggtaaaaaatgagagatactctcagaggttaaactcaccagatattaacgatgcagaagctaccatactcgaatctaaagagcaaaaaatcggattgactctcaatgagagatgcaccctagaaaagcataaagttaagaagcggtatgggaatgtaaagatggatattctcacctttgatgatgatggactataccccaaactcagactattttattacctcaccatcggtaaacctcatctcaaggctaatgacagaaaagctattgccaaaatgggcaatgacaataaaggcaagattctatcaaaagacttagttaataaaacttactccgctcgtgtgaaggtcttagagattcttaaactaactgactttatcgacaatcttagagatgaactcttaataactcccaataatccagctatcaccgattttaataatcttctgctaagagctaagaaggatttaagagtattaggagtcaacatcggaaaatatccaatggccaacattaatgccgtacttactctcattggtcacaaactttctgtaatgagagatgagttcggaaaagagaaaaggataaaagtagatggtaaatcataccgatgttatcaacttgaaacattaccagattttaccaatgatactcttgactactggttagaaaatgatagccaaaaagaagtaacagcaacagaaaattactccgaaaattttaacccttcaaatagctacaatccagacagtaagacactttcagagggtgcaaatttcctatatataaataaagaagaattgcatccaaataaattgcacctagaaataaaagaaggtgctgaactttttttattcggggtaaaggtgattgtgaaaggaatcttggacggggcagtaactatattctctatgggtcaagaatacgatttatccctcaatgaactagaggggatgttaacatcatgaactttacaagaatctttttaaagggcgatcgcaccatgttaaatgatggtacatttgttcagatatttgatatttaccatgaccacgcattgggagtgacccttgaccttaagacagaaaaaattatttccgatgatgttagggtaattactgtcaaagacttattgttcgatggcacttataaaggggtaaaatcttttatgcccgataatgcccgataatgcccgattgatgctacaaaatcccataatcataagcgataatcccctaatagcttgtaattcttgaaccgtagcgattttagagtattccaaaaagaagaaataaacaccgcaaaatgtcgtatttcacatatataaaccaaggttttttgccctaaaatctttatgtttgtagtgtgatgttgggtcaaaatggtcagaaaagttgcaaggtttttatggatgcttacgcgcgcgaggggtaagcatccccaaatagttactttatcctagtccatgcccatttattgccgtcccgttcggctttaaaaaagtgccaaaactcacaaggtgcaataaaaagttctgtacctttcgcaaccctagataatctttcaacagttactttttttcctattatctcggtacaaagtttggctagtttctcttttccctctttttcaatcaagccttcttgtatgcccaactcattgattaatctctctatttttaccattatttcccgttcaggtagtttatcccctaaatcttcatcggggggcaatgtagggcattctgaaggggctttttcttctgtctggacattatctaatattgaagtaaccaaactatcttcagttttttctattcctattaattcatattcggttactgtatccgtatcaatatccgaataactatctttatccgtattagctattcggttaagtttatccgttaactcagaaacaagactatatagcggttttagcttttcttctatcctgttatctaatacggataagtttatacggttatcattatccgtattagtatcattgggcttttttggtagttctaccccctcataaaccgcttttattcccaattccaacagactgataacagtatcctttataatgggttttttgctgatatggtgaacttttgccccttccatcattgcgatactttctatctcactcatcaacttatcgcttaagtgaatctcgtatctgtttaatcccttactggttttattcatatccgtttactttattcggttaacaattctattttatacgaataaaatattatacggttaactttatacgtttaactattttatctatacggataacagtaataagttattcgtattagttatacgtttacttttatccaaataaaattagtgcatttaaactaaaagaatgattttatcggagttgatagcattggattaacctaaagatgtttataagctatatctgataagtatttaaggttattttgttattctgtttattgacattatcagaataaaagaatagaatataattgttgagagataagaggtttaagtgattatggttaagaagttagttggttatgtcagggtcagtagtgaatcgcaagaggataacactagcttacagaatcagatagagagaattgaagcatattgtatggcttttggttatgagttggtaaaaatattcaaagaggttgccactggtacaaaagcagatattgaaacccgtcctatttttaatgaagctatagaatacttgaaacaggataatgctaatggaattattgccttgaagctagaccgaatcgcacggaatgctttagatgtattgcgtttggttcgtgaaaccttagaaccacaaaataaaatgttagtgttactagatattcaggtagatacttcgacaccttcaggaaaaatgattttaactgtaatgagtgccgttgctgaactcgaaagagacatgatctatgatcgcactcaggggggtagaaagactaaagcccaaaagggcgggtatgcctacgggaaacctaaatttggctataagactgaagaaaaggaactaaaagaagattcagcacaacaggaaactattaaactaattaagagacaccgtaggtcagggaaaagctaccagaaaatagctgattatctcaatgcccaaagtattcccactaaacaaggtaagaaatggagttctagcgtcgtctatcgaatctgtcaggaaaaagctggttaagtctgtttatagatatttagaatttattgaataaaaatagtatgaacaataaatatttatggactaaccacgctcggaaacgtttaactgaacgatgggaaataaaagaatcatgggttattgataccatcgaaaatcctgaacgttcagaatttattgttgatgagtcaggggaaaaatatcattactataaaagaatagctaagtttaagaatagagtgttagaagtgataacttctgccaactcaacacccacaagaataataaccttttactttaaccgtaacatgaggaaaaatttatgattgttacttacgataatgaagttgacgcaatttattttaagttaacggaaaataaaattgatagcaccgaacctcaaacagacaggattatcattgattacgatgaaagtaataatattgttggcattgaggtattagattttaattatcttgtcaagaaaggtttaaccgttgctgatttacctttttctgaagatgaaagattaacagcttctcaatattttaattttcctgttgctatctaatccagaaggggcaataatccccttctttcatcgagttagacttaatatcacaaaagtcattttcattttaccgtttcttttccacagcgtccgtacgcccctcgttaaatctcaaaaccgacaatttatgatgtttataaaaagttactcactttaataagtatttatactcattaaagggttattctttttttgtagcctgataggttgggaaggaatatttcagattatcagatttgttg

SEQ ID NO: 2 - DNA, 35386 bp, Cyanobacterium sp. ABICyano1
ttgatttagattgttgtataacttttattttttagtctagtgggttttatattatgagtaaattattctctttgtgcatagctatactgttaaatgtcagttgcgtgggaatattactgaagtcgagtcctgttaatgctcagacgctttataatattacttataacaaacatggtagagttttaaatacgtctgagggtacattttatgttggtcgttctggagatgctatcaggagcgtgtctgggaaaaaaatatatggttattggaaagaatctaacggactactttctatttacattggcaatagaatttatagcttcaatctcagtggttcttctaattcggaacgcagacgttctattccacctgaatgtttacaatatcctgataccttttattgcagaaatatcgagcggtaggctgtagttataggctaataacaactgcctaaatcaatttccattgactaaatattttgtttaactggtgttttaccttttatggaactttctagcaggataatacattagcgaggatcaagtggacgaataacaaaaattcctatcgcctgtggaacattttgtacataactttgtaaatctttagcaacagtaacttgccctgctggagaagcatgaattaaaccagtttgattcttctgtcgataaattaaccccgtatgagtaacatctaaaccttttattttggtggtgataccgataatatcccctgatttaagttgaggataaatagattttattttattggtgggaatagaacttaagtttaatttgtttaaattttcttcaactttttttatacattgaaaattactttcattgttatttaattgaggatatttagatctatttactgtcatgaaattaagctgtttatcgagtggtattcctcctaaagacggagttaaattttttacaaatcctttgttttcattttctgctatccaatcagaaaaatagtgaaggcgatcgcaataagtaacattttgggtacggtatctttgctcttgaatatttgtaataaaagtagaataattatagtcttgaacagtaattcctttgactaaacctagtacagtctcgacaaataaaacacaatcaaatttagttaaagaaataaataaactttctttgttagtttgatccaataaaccagcttgatattttgccccgataaattgttgagctaatgtttgtataatcgtttcaagacgttgctcgtatagcttattagcctgtgctaaattcataatttgctgaaacttcttttcatctgaattattattacgaataggctttgtttctgagacaatttggacaggtaaagtattaactatagggcgactttctgttttatcttttaatgaaaaagcaataaaagaaagaaaaaacattacagaaagagaaatcgttttcgacataatttaattgaaaataaataaccaacgttatatatatatgactgtatcttttctattaaacgcttatgattagatcattataaaaaatttagaataaccatattcctacttatttttattcaaaaatacttgaaggcttttatctttaagaagcccacaccataaatctttgattttggtgctgggagtatgtcactattgccaaggatcgtaattatcaaattgtttgcaaagatagcgtccaactcttttgtcaccactatgttgtattaatagcattatacgttgtggatcatttacactataattatctataaaaccagactttcccagctcacatactgcttcataataatggttaggtactaaacgcttacctttattatcttcaagataagcaatagcacgaacagtatgtaaaccattaaaattattaatataaagacccatatcgttatgataaattacaagttttataccacttttaaaagtaaaaactgcaaccttaaaaccatttcttgtcgaaatctgctgtgaataagctggttttataagaaataaaaagaaaaataataaaattagagttactacatatcttttatacatttatcgatcacaattaccgcttgaaaaacttatttatttttcattataatccacctatcgaattatttttatactgattaattttggagaggatatactcatcaaggtcataatctgaggttttgtgaggttggtatttatagatctaaaaactcaagttatgcccttgaaaagtataaacattcagatattgatttatccaataatctattttaaagcatttttagttcctaagcgatttagattaaagattctatttgctgaatcaacttatctattttttgccatttcttctggtctttttcccatagttttgctttattcaccgtgttcactaaattttttagtctattactaggaatatccttcgtctggttaggagaaaattctttgattctattcttaatttcctgtagtgataaattagatgatataacctcttgtaataattcttctcgtttttgttcatctttaattttactgagggcgatcgcctttgtataagctattttcccctgtctaagtacctctaaaatagaatcaggtaaatgcaagagtcttaatcgatgagtcatgaaagattcaaaagtaattaagccccccaaagttttctcgataatatccttttccgatttaccgacaacgttgtcggtaacttttcctttcagttcattttgccatcggtttaaaagggaaataacctcttctatggagatctccagacgcaaagccaatagttgtaaaatcgattctgtctgctctaaagggttcaaatcctcccgttgtaaattctcggttaaagcaacctgtaacgcttcaatatcacttaactctttgataactactggtacttcgctaaattgtaattctctcgccgcccttaatcttctttctcctgctactaactcatacttcccgtcattcaatggtcttaccagtaagggttctaatataccttgttgggcaatggagtttttcaactccgccaacttaatgggatcaaaatagcgacgtggttgttgtggtggtaaaacaatattttctagggctagagtgttattagttagttcttcttttcccatcaatacgtctaaattatcttgcaccactttacttttagtgctacggtaaggtttttcagtttttctgcgaatacgagacgttgttgttttttcctgattattaggagtagtcattttccctatccctgttaagctagtctgctaataagtttacactttttggatgggaaaagagaaaaaagtgataaggattttttagacttgataaaaagatgagtgaaagggcttacctgttccctaagctaaaacgcatttaaccttcctatttaaagctctgaatcccttactgtaaggagttgaaaattgcaaaatcagtgggttctagcttatcctcacatgacgatttagatgcctataagggtaaaccagccaagaaataattagaaaaaattaaagcccaaataaaaaagttaaaatcaagaaaacggcaaagaaaaaaagatgactactcaactaaaacccaaaacctataccataacagaatatttaaaacttgaagatcaagcagacataagaaatgagtatattaatggagaaattatccccatgacaggaggtacaaccaatcataatttaataacgggtaatctttacctagccctgagattagcccttaaaggcaaaaatcaacccgtttttattgaaaatgtccgtttatttatcgctttcaataatatctttacttatcctgatgtaatggtaatggcaaacgagccagaatattacaaagaaactaaaaccaccgttactaatcccctgattattatggaagttttatccccagctaccagagattatgatttaggacaaaaatttgaatattatcgcaccctaaacagtttacaagaatatatcttagttgatcccgaaaaaaccatgattatggcttatctccgagataataaccaaagatggttactaaatatttatgaaaatttaagtgatattttacatttaaaatcaatatctttagacatccctttaaccgatatttatgaaggagttttcaattaagctaagacgcatttaactttccttttttagctctaaatctcttagtataactggttcgagatttccaaataggtgcgtcttagcttaaagctcattatgtatagaaaaagccagattattaaatatttctacccccaatgatttaggttcatattttgctaaaggtaagccttcctctgaagcatctacaaaagcagtcaaacgggggattggttcatatacttgggcgatcaaactaaattcttcctgaatagcctttaaagttcgttggtcttgggaatttgttttagaataacgagagggtataaaaccagctatgactaagtttttgttccccctttttttcacccgtgagatagtttctaataaaagattcgtcccttgaaacgctttaaagtgagtttcaatggggattaagacatgagtagaggcaattaaggcactatagctcaataaccccaaactaggagggcagtctattaggatatagtcataagcatcaagtaaaggctcgatcgcctcttttagacggacttctctaaaatcaagatttactaactgtatttccgccgccgataaactgatattggttgctactaaatcaacaccatgaatgtcaggaataatttgtaagggttgctcttcaatcaaagcattataaggagtaacttctaatgaatcggtatcaacattcataaagtgacttaaagaggattggggatctaaatctatcaataaaatcttttgcttgagcaatgataaatgataacctagattttgcgtgatggtcgttttcccgactcctcctgcttgattaaataaggcaatgactttacaacccatactctgaatgttggtatttcctctttgatattacgagcattacggcttttgttagcttaacacgaaaagaaaaaataaaatcaatcaattaatcgaaatattctcaattcgctacttacttagacttatttcttttgtgataccaagtggtaactgtcttgaaaggaactcctgtaatgcgttcgatgtcaacatagtttttaccctcatctcgtaaccttaaacattgttgttttatctcatcagaatatttgggaggtctgccagaaaaattttgagttcttttaatacccctctctctagcatattctcgcacctgatgaccagaaataccaattttttgctcaatttccttatcagaacaccccgtcaaccacatctcgatcgcttcttgcttttgctgttcagagtaaatttttttcggtcttgatataccaacttttacaacgtagtctctaatggactcgacattaattcctgtttctacttcgatgttcattggtgatataccctttaaatataactgacgaaccagctgtttttctgagtttgttgcattgtcaatggtttttaaaagtccagcgtttttaattgttcttctaatattgttagaagacttcatgcccaataactcagctattctgggtattgaatagccatttctgtacattggcacatagtagctacttcttacttcttccgaatcaattacacggggtgaaattaaaggatattcttcacctgacggtaaattctgttgcatcttttccacaaaatcgacaaaataaggacattggtgacattggggttttaaacctggttcaatacacccataatttgaatgccaattcagccttacttttgaatatgcactcatgtatttatctatcgctcttttataaaaatcttcttttatattacgcatttaatcctccaaattattttttttactggaaaaagtttcaacactggttaagactattggttagaaattaaggttaaaagcaaggtgtcaaggaattttcaaagaaaaagtttttttgattttttcccaattctggaaacggagcaataattaacccttttttgtcaaactccgcaaacatttgcaatttatagattttggatcaattgtatatcaatcgatcaaaccaatatttaatattataaaatccctcgaaacttcaaattagtaaatcttagtctgtagtatgttttgagcgctatttaccaagcaatttgaaaatatttaataatagttaaaattggaaactgacaaaagagggttaatttctgccttggttttctcttcctttttataattcctaaatctctattttctggggctgaaaaatatttaaccacctcttttgctttgcctttattgtaagcaactatatatcatttctattgagattgaatcaaatggatttgatatgaactagcttatctgaaattatgcggtaaaagagaacattgacaaacttctttgttacaagaaagttactatttaatctgtactgaaaaattagattattaggtaataattaaccttatcatcatgaaatatcattattcttattttagtttttttttcttgaaaatgaaaaactaatttgtcaaaaagtattaaactctacactttgaattttacaatttaaaactactattctttttattaatttagaatagagtaattccctttccttagtattgagagaataccaaaatcctaaatgagtgatgtggggataagataaaatatcctcagcagttgcttggacaaactcatttaaatctcgacgatttaactcttgctttatttgtacttctaagtcttgttttgccgtttctagggctttattataatgaactttcagcatttcctctatgcccactaattgctcttttagctttgtcaccgttaccgattcaagctctttttgtttaatagaagaatcataaatactactgttaaattgttgagctttttcgatgattaagtcgaataattcagactctaataaatccaaacgaatatttttcttatttgtacaacctaaccctgcacttcgacaagcataataacgatatttctgattatttttgttcacgcatttactgccacattctccacaaataatgagtccagttagctgagatctggttctcattgttcccatagttctggaattattctccagaatatttaagacctctaagtatagttcctccgataatagtttttggtctggatgagtattttcgtggatttcccattcttgtggcggtttttgtttccctcttttcttaccatcattaggttcatacttattataagctgtatgacctcgtaacactggatttataatccaatcggcaaagttttgtccagtacgccaaaataataattctggggttaacactaagtttgtatttgctctagttgaaacaccatatttttcataaagatagcgaagaacatctctgggttttcttactttcaaaaaatactcaatagcctcaatcgctatatccccctttgagagtcctcttatcaatgctgtagaattatctggtagagaataaaaagtttgataatccactggacgttcttctagtaagcaaattataggggttgtgtcaataatatacttatcattgtcagatatagtataaccccatggttgtcttccacaggcagactttttcttccgtcgatattcaaaacccctttttactctttccctcaacattcgccgctcatgtacagaaaacattaccagtaaatctgcatttaacatccccgaagcggtatcaaaatcaacatctccttggtctaataattttatttttaccaaggaagattgaaaaagatttttcaattgtatgtatataacttcgctacgagttaatcgatcccaccttgtagcaataacgatacatatttgtttattctctactaactgtattaatttgttgaactgaggacgttctgaatttgctcctgattccacgtcatagaaaatgtattctgccccagcactcttgagcctatctatttgttgctctaaagcatgacaattttctgcctgttcacgactagacactctggcatagcctacgatattatatttaaacataattaaattagaaaagttttaaaaattaattacttttattatatgtaattaattgaaaaatgtgcaaggttaaaacatctaaaatctgcacattttttattattttaatataaaaaattataaaataaataatatataaaataaaattagagcaaatttaacttgtaattatttcaagttaaattatatgaacctatttataataacttaggtcttattgaataaatagaaatcaaattaatcaatatgtatcaggaattattgtttaatttcactacataaatttttacaatttgaactaaaacactaatttcctcaaaaatagattaatatagtagttatcattaaataaatagaaatacaacaaagaaaataactaaaatttttatttatatagcagtaacagttaattttataactagaaaatcatttgggaaatatttataggttctaattggaactaatcttatttctccaacctaaaaaacattcagcaaatataataatactcaaccaaaaaatctcaacaaaacttaataattaaattttttttgagagcagtaattttgactaattcaatagagttgacattatttattgaaaaagaaaaggcttagttattctctagccgttatgtgatataaaatcacattaacagtacaagataactaagcctataatgaaaaatgacaaaaaaatttacatctcggatggaacccgagaatgaattaaaaaacatttaaacaactcggatggagccgagtataaaaaacgttaatttcatggtatcgcattttaacactaacttgaataattcaaatgatagcgattttataatctctgaccacttagaatttttaatgttatcagatataccaaaaagaagaaaagaaaaaaaatatatatgccccaattgtggtgaacatcacctatccatcaataaggacgggttgcggtatgactgctatagttgccacgataagagtgcgatcgctaaaattctttatcggttaaagcatggtgagactgaaaagaaaattgttaagcctaaatcaactagaagatggacttatacccacgaaggcaaaccatacatccaagtaaagagaattgatgacggcacgggcaaaaaagatatttaccaatatcgttatgagaaaggaaaatggttgtcaggtttaggagacaacaatgcttttcttcagtctaattgtgacttactctacatagatgaagttaagagagcgatcgcatccaatgaacttatttttatagctgaaggtgagggatgcgttgatagtttaagagaattagattttgtcgccaccactaacattggtgggtcaggaaagaattaccaagcatacgaagttttaaaggattatcagaatgtagttttatgccctgacaaagacatatcaggacttaagcacatggaagctatcgaaaagatattaagccatgaaccgatgtggttatatgtctatcctgagaaattttggaacagcttacccaattcgggggggatcgacatcgatgacctgatcagagaaaaacgcaccgatgacaagttaaccaatgagaaaattaaagaggtgattatggaattagtaggggataaaaaagagtttgccaccacgaaaaaaactgaaggtaaagttgttaatttcccttctaaaccgattgataaagatgatattcagtcaagattatcggaattattaaataaaggtttaaaaccctctcaggaaaccctagagattgtcgaaatagcaagggataacggtattcatataaacgagataaaagacatttatcggagtttgaaggatgaaaatgagtctgaagaattaacgttagatttatcagaaaaactcgaaaacatccttgacatcgagaatattaaccttgatttaccttcagtcttacctcaagagatagcgtcaaaaattattgtattagcagaagaaatgaaagtagcacctgaacatctcttaactgcgatgctaccaacgtgggcatctatgatcggcactaaatccaaaataattgtctcttctgctaaaggatatacgcaaccatcaatcttaagaacaatgattgttgctaattcgggtgatcgcaaatcaccaatcttaaagaatgctaccagtgccatagtagaaatggatgctgattcaatggcaagttttaaacaggaaatgagagattatgaggtggctttaactcaattagagaaaggacaaacaccaccagataaaccaactgctaaacgctacgttatcgatgacttcaattttgacggcatggtcaaacttcattcagaaaacgaagtcggtttattaggcactatagatgaactgaaaggatattttacccgaatgaataagcaaacgggtaaaggtgacgatgagcaaaaagatttacagctattcaatggaagtcctttaataaaagatagacaatcagaaagttgcagtttttatcttgccaaaagtgccgtaagtttagtcggtactattcaatggcaagttttgggggatctgataaagtctaaaggggaaaatgattcggctggtgtggtgtgccgttggttagtgtgtgctaaaccgttggggatgtcaaagttagatttattttcaggcaatgatgatttatttgataccttcaaaaatgaacaaaaggaattactcaaatacttacgaggtttgcccaaattagattttcttctcagtgatgatgctaagagactatggcaacaattccaacatcatttagaagatttgagggcaatagaaaccatagacgctttatcggtggcttatcccaaatttgaaagctacatgagtcgtttagcactcattcttcattgtgtggaatcgttttatacccgtgctttaaccgctactatctcaggaaaaacgatgaagcgtgcgatcaagatgacccaattttacatgaatcaatatcgttacgttttagctaaatgctcaccttctcaatctcttactggtgatattctcaagattcgagatttactgcagaaaacgggtagccttacagttactcaagttcgggataaattcagacacctgaagaaaataccaactaatgaacggaaaactattattctcagctactttgaaacattggttaactcaggttttgctcaatgggaaatcgcaggcaagaaaattgggacaaattgggacaaaaatcgggacaaattgggacaaactcaaaaaacctcacaactcattaatataaatacttctggagataccgaaaaaaataaattgggacaagttgggacaaaattgggacaccctaaaatcagtcatatcaataatttaaagactgaattgggacaaaataataaatttaactttttctcagaagattctaagttacaaaagactgaagataataattcgacttcagttaaagaagatagtaaagaaaataagatagtaagtcagaaaaattgtcccagtaacttctttaaagttaataatgacaatagtttagagcgtcccaaaaatgtcccaacttgtcccaacgaaacgctgaaacctagccatgataacactttagagcgtcccaatttttgtcccaattttgataaaagtgtcccaatttctgaaaaagatgattattttattttttcagtcaaaaatgaaaagctaaaagagaaggaaaaatgggcgcggcttaaagatggagtaacagttaaggggatgaaaactagattactcgtagatgttcatgagtctagttatggttttattaagggacgtgaatcaggcttgacttgttactatgaggtgaaaaaatctgatgtagagatatttgagggggaaaagaaaaataaatgatagacgtaaattagagtcagataagtaggaggttgttactagaagtgatataaaattgaaacttttatatagcaaagggtttagaaaactactttgccgattttacagcttccctagctttactccaatttggcggaaacatcacttatgttcagataaactgctttagggggaattatgaaggttaatggtcaaggtcaggctcgtattcttgctcctaatgaagttactgctatctttgaagaattatgtttgcgcgatcggactgtttttgctttttgtctttacgctggctgtcgtatttctgaggcggcttctattcgcatggaggatgtttctttgcgcgatcgcctcttgttacttccttctcgaaatactaaaagtcgtcagagtcgcactattcctgttaatcaggagttatcagcgatggtgaaggagtatttattggcaacgggtattcgtagagggtttatgtttcctcattgttatgaaaagggttatgagaagggctatctttcccgaactactctacattatgctttgcaaagggcttgtgagacgttgaatatgagaggcgttagtacccatagttttagacgcacctgtttgacgactatgtccaatgctggtgtgcctctgcacgttatccaagcgatttctggacatagtactctgtctgctttgcaaaagtatttaggagtgcaacctaatcagttattctcagccattgacaccatatccatgaaatcctctcctcctgcttccgattctgttttctctgggaagtttggattttaatggtaatttttttattttttgtcaaaattgcataaattccgaatcagtcactgataaataaatagataaataaatcattggtaaaaaccatgaaaatatttttgtatattgtcggtggattgtctagttttattttaatttccagtggtatttctatgacttcaattgaaagtgccgcttctgctgaaccctttggttctcgtacaattaatgaggttttttataataatattggaactggatttatcggactaggtttttttactggtccgactttaatagcattagcaaatctttctgacaaatctacagaaaaatagtatttatattttgaaaaatacaatggtaattttgatgatattattagatgaataaatagtaaaaaatatgactaattttttttctttttccctgaaaactttattaggaattggcattactttaggggctttaactattcccaaaatttctcaaaaatcaactgttttagcccagaatacgagagcggttgtttttgctcccccttccaacgttcgagcaacaccaaacggacaagttatttgtagtgttaatgccgttacttctattaatatctatggttctagtaatggttggtatgtaactgatgtttgtggtagaaatggttatatccatcatagtcaaattcgttttgaaagtagtttccaaggtgtaaaaaatccaagttgtttagtgactagcattcaaactggacagttagcggtgcgtaaaagtccaggaggagaggcgatcgcaggattaaataatgataatttagttcagtatattcaaggagattttccttggtattatatcaaagtaataaaaggaccaaatagtgcagtaaatggcagaactggatgggtaaatgctaattatttagaatgtgcttgggattaacaataaatgctaaaaacatactattataatgatttcaatttggattaaaatatctgttatttgaaatgactatagtaataaaaaaataaatgtttagttattttctcttccagaatttttttacaatttattgttatgtttatctaatataaaatgtcacaatctcggtatccagaaaactgggaagaaatagctaaacaaaggaaagaagctgttggttggaaatgtcaaaaatgtggtattcaatgtttgaaaccagaggatgatcgttcaaaattaacgatttcagaaataaaaagaagaactttggcggtacatcatgctaattatcaaccagaagataaccgccccgaaaatttgattcctctttgtagcccttgtcatctttcttatcatacgagaagaaaaggtagtgtctctctcggacaattatctttgtttgaataatgtagttatttctcttttttggggttcagagctaaatacgagtaacctgccaccctgtttgattaccgattttgccaaagcggataaacttaaaagcccctctaatccattctttgccctttggcttggttcccaataattctgctacttccttactggttagaatataaccacgttctgccgcctgatctaatttttcccaatgatcaatagggtttgagggtcttactttttctatcactttttccactgctgtttcaagggtcaattgaaaaagtgatagttggatatattctggattagtgtctaatgatgaactgacacagtctatttctgaatttacagttaaattgtctggagtagaatttacactgtctgtttctggatagacagttgttttaacagtgggagtaaaggttttgatgcttcctcctaactttaagtgttcctgtaattgatctagtgtagtcactgcatcttcggcgacgtagctcttattaccttcttttaaaacctcagctttgatagcattgatgcgatcgtacactgactgccgagattttaactcatacctatcttgtaattccttgatggagtattttttcatttgtccagttttaaatagacactatagtcagagtattttatcttaataaaccctataccagtaggttagctattttgtactttacattaggaatgaagatatttctcagggcgatcaagaccctctctatgaaatcatctcctcccccctctgattctgctttctctggtaagtttggcttctgaacttttattcattataaaagcctatagaaagaatatagtaaagatacgatcatattatcataatttttgattcaatttttccccatatttcttgattatatatacctactaaatttttacattttatcattaataaaattgcatataaatagtcaaacatttgagtaacttctgttcttgataagtcaagtttttcaggtgtaattttaaaagattctaaccagtaactgataattttttttgtataacaagtatgtgtttcttcaggttgatatttatcaggcatttcttcttttaattcttccaatgtctgaattatttgatctaagacaattttatcatatattttattttcttttgcaaaataggcatattttataaatttttcaataatattagcattagctaatgcaactggattaacataataaatatgattaggattaatttgtgtcatagcttcaatgaaaagagtattcatcgaattatccatgcaagaaagattggcaattgctatccctaaattattaggaaaaggattaatatttcctaaagaaacagcatctgttgcagaataaataattttattaggacatatacaagcaatagaaaaagccaaactaaaatttaaagctctttttccataagatggaataccaaaagaggtatgatcagttattttttgattccagttaactaaatattttaagtcaggagtattaatcaaagaattgataagttcggagattattaataaataattatctgaatcttgtattaattctgccaaaaataaaaagacttcttcatagcgtttgtcaataaaattttctttgacaaaatctttaatatttagattattttctctaatataataagcaacaaaatactcctgtaatgttaaatgagaaaaagaataatagccttctgatttttgtaaaattattccacaatttaattcaatttcttctagtataagttctggatcaatagagtcttgatttggtaaaatattttttagtatttgttctatttgcttacatatagttcgtttttcaatcaataatttatgttttttaaaattttcgtaagcgatttgagataataataatttgatatgtctattatttaaagattgataaattttatttctcgatacttgttttgatttatcccaattttgtaataaattatcaataattttttcgtataaaaacgattttttatttgataaaattgtctcgcttaaatcagttagacaaattaaagttagtaataaaggagttttagttagttccttcaaatttttatcttttaatatttctaaatattgtttttgtaattcattagatgattcaaaccatttattaataaacagttttacttgttcttgatcaaaatcattaattactaaatcgataaaattattgaaagatataaaattatagtaggctataatccgagaagaaataataaagcgattctttggatattgatcttgtaaatttctaatttcttcagttattatacttattttatcttttaatatttcatctaaaccatctaaaagaattaataaattaccttcttttaaaaaatgtttagtaaactcctgatttatatttattccacagttatttaattctttggttattccttctaataaattaaatttttcatttcctattattaacttatttaactctaaaaatattggaatataaatagatgtatttttatctttttcttgatttatttttaatacttctaacccaagtttttttagaaaagtagttttaccactaccagcattacctaaaattacaaagtttccttttctttctaatatgtcaattatattgcattcatatttatggtctttagaatgaaacttgatgtcagtataaatagaatctaatttttttggttctgacattcctaaaactttcacaagaccatatcgtttaataaatgttttactatattcagaatttttccccctaaatttcttcttttcacgaaaataaaatatgtttatttttgtgaatgatatattttttaagaatttgcaaaaaaaatcaataaaactcccgaaaatttttgtaaaaataattttttgtattaattcaaaagtcattttatctagtacgtcaattattagaatttagataataaaaactactgtagcaatcttatttaagttgtgacgcaataactattatactagaaaaaaaagtaatctctccatcgaagaattatctctatttgactagatagccttgatttaatttacatttaagtcatagatatactgatagacttgggtacatttctgctcgtataattccactgaataactttcgggaagacgatcgagcatatctttgatggtaatctctacattagcccttgtctgttgtctcttacgccagtcgattaccaatttctctcgtttgaggatggttaataattctctcacgatttgtttaacgtttttttcttccttttggcttaggttaatattgggtttggttagcaagtcgaaaatcgctaattcttcctccgtcagtttttccccgactgcccttttctcttcttcattcaattcttgggctaattcaattaactggttaaataaccattccacgttgtgactacctgaattatagtcttggatcatttgttgatacttctcatagtaattcaggcgacttttattcactgttaacatttcctttacctttctctctacgagggcttttaacctctctgtttgggtgttttttgtttgcccctcttgaaattctgcttctagttggtttaagtctaactggcttaaatctaccagttgtcggggggtggagggtataataaattctcctgcaacgatcgattctgctagtaattcctctatctctgttttcgtttctgatatatcaatttggggtatctcttgtttaatctttagtctcagtctttcgagtatttgttgtgtgggggcaaattcggaggcggtagtatcgggtaaaatagctttatataaacgggtaacgttattacagtgggcgaagaaagtttttaaagtctcctcattaatcaatatggcttctatggcatcttcccataccttcactttctcaaaggcggttttttggatggtggttaatgattctaagttaatccctattttacggcagaaggcgatcgcctcttggctgacttcccttaacttttcgatgagggcagttttagctaatacgggattatccccctcgtcaacacctcccccagaaactgaaccatatattgctaaagcgtctttgaggttacgaaataccccaatataatccactatcaaaccgtttaccttatctttaaatactcgattagctcgtgcgatcgtttgcatcagggtatggtttttcatgggtttatcaaggtaaacgatggcacaactgggggcatcaaagcccgttatccacatggcacaaacaaaaacgattcttaaggggttattagcgtctttgaattgttcatcgaggggttgggatttatccgctagtctttgacggtggcgagttatatctaatcctttctgtctaaaatccgctacttcgttttgactggaagaaattactactgccatgtctgtttcttccatgtactttatctgtttactaattcttttgatttcaaattcacttaaattaggttgtcgtattttttgttgtaattgagttaaatcttcttgccaatatttctgtactaaatcatacattttaacggtggaaaagcgatcgatgctaattaccattgctttttcttggtagcctctccctaaaaagtgactgactatatcacgggcgattttatccagtcggttaggattaataatgaggttatattctctggtgcattgactctggagtaatttttctgcttcctcgtctaataaggcattgtcaataatatcttgcatttcctcgttaagttgctcattggttagctgtaactctgggatgcgattttcataataaaggggtacggttgccccgtcttccactgactgacggaagttataaacactgacataatctccgaaaacttctttagttttttcttcccctgccattaaaggtgtgcctgtaaagccgataaaacaggcgttaggtagggcgtttctcaggttgagggcaaaagtatcatattggctacggtgggcttcatcggcaataacaatgatgtctgagcgagttgatagttgggggtagttttcccctttgttggtacggaatttttgaatgagggtaaatatataacgatgatcttcttgtagtaattgttgcagatgttgggcgctgtttgccctaacgctttcttcagcttcggtgacggcttctacataggcgaagttttggtaaatctgtttgtctaagtcttctctgtcggtgataattaagaatgtccagtttccccttagtttccgtagtatcttctgggcaaaaaataccatactataggattttccgcttccttgggtgtgccagaatacccctagttttccttgattggtgctaatattgttaactgcttctatggctttatttacccctaggaattgatgattcttggcgactatcttaatcattttgcccttttcggttttaaatagggtgaagttttcgatgatgtcgaggagatattgtggctgacaagtacctctaattatggtatcaagggaaattatccctgtctctccttcactgttaatctttttccattcactaaaatgttcaaagggggaggtaatactgccgatgcgacttttactgccgttggaaaggatgataatggcgttataccagaatagttgcggtatggtagttttatagtctcgcaggttgtcgtcataggctttttcaaggcggttatggtggcttttgagttctataaacacaaggggtaaaccgttaataaagccgattaaatccgcccttctgctatatatttctccttctaaccaaaattgggaggcaaggaaaaagtaattgttattagggttatgccagtctataatttttactgtgtcgatctgctcttggttatcttggtttggatagctaactttaattccttcttttaataatttatatatctctcggttggcattctctaagctgagagtataacgtggttgggtgatttgtgcgatcgcgctctggagggcggtttctggtaattctgggttaagcgtggttaatgcttggtgtagctgaggggttaacactacttcttttctactttttctccctaatgggttactatctcctactttttcatcatagctatttaaagtttgccatcctaattgttcaaaaagtgcgatcgcttctaattctaaggcattttcggagtcgggattataatttgtcataaactaaaaaatcgctccttagttaatagtgaaaaagatattgagagtattattaatataaatattgttccatattttcggttaaatttccttgattaactacagcgataaagtctgcttaatcaacaatggcgtttatgttttggctgggaaaatggtactgcttttgatgtagaaatagttgattatcattaaaatattatgagtgattctgtgattaaaaacccccatgctggagaaattctgaagtgtgaatttttggatgagttaggtatgagtcaaaatgccctcgcccatgctatcaatgttcctcctaatcgtattcatgccatcgttaacggaaatcgaggtataactgccgatacggatttaaggttatgtcgttattttgggctatcggaaggctattttttacgtttacaaaatagttatcagttactagaggcaaagcggaagttaggagaaaggttaaatgttattactccccttatttcaacctaagtcacaagtaataagtttaactggttaatctctctgtattaatatcaaggttttctacgtctatctcccctgatattagtttcggtaatagcaagtcacgagtttttctaaggttaatatttttttctgttaatatttctaagttacgaaaaataggctgtatcaaaaactcaaattcattgacaatatcaatagatggttgaattagctttatattttccatatctgcttttgttacagatttaaaaatcgtacctcctcccattaaatcatcctcattaaattttgcttttagttgttgatataaaaatatttgattattcgtaagacttttaatagcagacaaaccacgaccaattacaatctttttattagcaatattaattctcccaacgggcgcacgaacactaaaaagaatatctccagcttctgcaattcgattaaatactgttgtataaactttatctataggaaatctatcagtaaagttactaactccttgatgaaaaggtaatcctacccctgtctcattataaaactccgactttggagattgacccattacaagtttacaaacatcgttcagtttcttaacctgccaaccttcaggaattaaacctaattcagattcaaccattttgacgttttcatggttagggaagcggaatttaacaaaccattcttgataaacagtttttgccatctcctctagtatctttatccttctattattattctcgattaagtcatcataatttgataatatcgatgcgatcgctctctgtattggtagtgggggaggatctatttcaatttgagaaaaaacattaatgtcaactctttgccttccagatgctcccgtcatacttttgattgcaggtgattttatcaaatcacttgaagccaaatagtaaatataatcaggatcagaaatattattttttgctctaaaaacaataaattctgttgaaccaaaacccaaactagatacatttttaacttgagcaattttgccattttctaaacaaggagtaattctggcaaaaagtacatctttattggtgaattttgaacctcctccattaaagatttgctttgaattaggactaacatatttattacatggattaatcattgccatgtcaatatgataatattcttgtttttttgataggctatatcttggattaatttctacaaattcagtaaaaagcatattttaactttgtgaaaacaaaataacattcaatctaataagaggataagctgagatcgtcttttaatatattatgataagggggagcgatcgcattctaactattaacctaacccaagatgtaaattaagagcgagattaaccaaattcataagctccccagagagagtacccaccacatcaccctgtaacctttcttttgaaatagtcctaacctgctgtgcttgaatcttggagtcttgaggtaaacccgaatcccccttactaataaacacctcaaaaggataaaccctcgtcactttagaagttatgggtaacaccgttacagtggaagccacccgattattaatatcattgctcacgattaacacagggcgagttttagccacctctgaaccaatagtaggactaagattagcatagaatatatcaccacgtttcatcacctaaaccgtctcctgctaccacatcccaatcagaatcaatctccttgtcagcttccttataggcattttccaaatcttgcgcacgcagtaacattaacgcctcctctactacctgtgaagaagacttacacttcctactatttttataactatcgatgaataccaccaaatcctcagaaatggacaccgacatttttcttgccgtcattgcttacctattagtcaataaaattgttattactttatcttactactttttgcccataattattcttaggtcaattttttatggtaaagttggctcgtcctatggcattttcagatagtctctgacggatattatacttgaatgaaattatgaggttcagttattctgatcaaaaattctttaacttttggatatttggaatctccttcttgaattaggttgataatttttttatttccttgaagactttcttgaaagaggttagctaaactctgttttacttgctcagaaggaagctgactcgtgatgaagtttataatttgtccagtttcagggtttttttcatttttttcattttcaattaaagctaatataccacgatccttgaaagctggtttcttaattttgttttcaattgtttttgcctgaatatacttgaattccgtatttgaattttcatttctcttttttaaaatttcattaaccaattcacataaaacgtgagggtaaacaaaatcttcaacttgccagtcgcaatttgttttttgaatatttgattcgtcattactttctcccataaaattaggtaataactctttatgaatctgcaaattgctatatttatttatctttatttttggatagacttctcgacctttattatcattatcgagtaatacaatcaagcaaggtttattatttttattttgataaaatgactgataaaactctagatattttaaaatattatctgcaccattagcagtaataattttagggacattgagcctaaaaaaacggcataaattttctatataaattttatctgagcttccttcaacaattatgttatagctatctaataattcataatctaagtcttcaattcctagataatctctaattttacgagtgccgtctatcttgtcaatttcgaccactttagtatctagaacattaaattctctgtttcttcttttataatgcttctgagtaatttctagctctaataaatagacattatccaatgtataagagtctataaaaacgggtgaatgtgtggtgacaaaaatttgtgctttctctgtaagttctttaagatgctttaacagttttttttgtaaaccttggtgaagataaacatctggttcatcaatcataaaaattactgatttagacttggttttttcaataattctatgatgtaacaaaatatacgctaatcgttgtaaaccagaacctttaccttctatatgttgattagagccatcattaataaagaaaactatttcatcactgattaaatctctaaatttcttaatatctgtatcaatatcaaagctaactccccagttttttcgatattcctgaaataagggattaatttcattagataaagtagttaaaacctctaataaaccttgtgtgtatttttcaaaactattctttaattctgatttcaagcctataaatctagatttatcatattctatatcgtaaatatcttctataatactattaataactttaggaaaagatatatttatagattcgataaaaaagaattctattttttttaataaattatctatttcactttcatttatatcctcatttctacttctaatattacttttaagttttttgcctgttgtcttttctaattcagtcagattaaataatcgctctattctataaatatcattattagacagcaaaaaattaatagatattttaggcgcagtggcaccccctcgactaccttcaagtttgtgaaatgggatatctgcttcgggattatactgatcagggttaaaaaataaatttatcgctcttagtgtgttagttttgcctgtattattttctccacatatagtaatgaagttattattatcgttaaattccagtttgagatttaaaatcgagcgatatctttcaatttgaattgttttaattttaatcatattttttttataactcagggtttacgtctcatctgtgctaaaaacaatgttaggagacttgcgatcgcttgaaaacttctttctaacccctaacatctaacaactgagagacattaagggcgatcgccccttctaactctcgtgcctcagaattaaggatttccaactcctcgtttaactcctccaaacgctcagtaaaatcaaaatcttcctcctctttttgagctacccccacataacgccccggattgagactccatccttgagcttcaatttctgagatagtggctaccttacataaccctgccacatccacatattgcccttcagggaagttttctttaaacaggggagactgataaaccgtctctggcttttcaccccgatataacctgacaatattagcgataaactcgatttgctcagggataaattcccgatgcgccctgtcaatttggttatagatatgtcgtgcatcaataaacaataccttatcacggcgaatagtatcccgtttccccttatccaaaaaccagagagtacaaggtaaggtgacagtatagaagaaattagaacccaccgcaatcatcacatctactactccagagttaattaacttctgacggatagttaactctgaactacgggcatcactagcggagttagccataacaaaaccagcccttcccttgtcatttaaggcactgtagaaaaaatgaatccagatataattggcattatccgccgtaggcattcccaaatctgccacccgtaaatccttattcatcttctccttatccaccttatccacattgaaagggggattagccatgacaaaatcaaacttacctaccgcctcgtgtatatcctcatagtaagtattgctttccttaatgtcacccgataaaccatgtaccgccaaattcatcttacagagtctcacagtatctcttgtcttctcctgcccataaatacttatttcactactagggtttttctgatgcctagcgataaagtcagcactctgtacaaacataccccctgaaccacaagcggggtcatatatacgtccgtgatagggttcgattatttcgacaattaatttaacaatggaagtaggcgtaaaaaattcgccccctttttgcccttcactcatggcaaacttaccgaggaagtattcataaattttaccgaagacatccccttctaaatcatttcccatatcaatttggttaaagtttttcagtaactccaccaacaggctattgtcaaagcgattatagttttggggtaaaactcccgttaattcctcattttccttctcgatcgctctcatagcttcattaatcgccttacctatatcctgactttctgacagactgactagataggaaaaacgagcattttcgggtaaaaacataactcctagggcttgatagtcagcctttgacactccccgtctcgaagaagttttactcttgaactgcgactgtgccttttggaagcgataatcagcataacgcagaaaaattaaccctaacacaggagttgaatattccgatgattttagggcggaattagatcttaaattatcagccgcatcccaaagacgagtttctaaattgttattattacctgacattaaattgtttgacaaacaaatatacttatatttactcattgtaccaagaatcgatcgcgcctcagtctgaattagagaaatagtgacagagtagaggaataaccgaatcataccaccgcagttgagcgccctgccaaccatcagcggaggtggttaataaagcaataccatactgtttacccttatcggttaattttctctctcggtttacccctggttttgcccaatcctgtaactccaaatcatgtaaggcttggtttaccttagcaggtgttaccttagtacctaacttagttgataactctgttgctaactggctagtaatcatccctgtaggggaggaactattattagtgatggtttccagtgccgatgttactacccccgccaatgctggtatctgtttggctaattccttcaacttccaagaggcgatcgccctctcatctattcctgcttctgccatccaaactgaagccatttcaataccatcagctatcaattttacctcatcagtccccaagttaggaagaatagaggggcgttgttcatcagtatcggacattgaggcgcgatcgtatctatcttttatttgcatggatgcaaagataaaatctagcgtatcttcgtccaatcataagaattgacctgcttaccattcttatcagtttttgtggttgtttttagtttcatataatcccaaaactctggaaaaggtgcttttttctttccattagctaactctgaagcccttgcagaggaactaaaaccaagagctttggctaacatcttagttcccaccttaccttttggtaaagccaaaaagtccgcaggaatatgactaacatcggcttggttattaactttgctcctatctaaagtaataactaattgagaagtaagattttcctccgtaatggttgacatagaagaatccttgacctctggttttttctcatcattctcaattaccttattactaactttattctgaccctttttagtgggagaaatattctccttacttactttcttaacttggttagtatctttactaacatctttttcatttaagttatcaactaagtcaatgcctttattgctatcttccctatttaagtcattaacttggttaatatcttcgttactatcttttttattatttttgttaaagttattaacttggttagtatttttattaatatctttcttgtttaagttatcaactaactcaacatctttatcactacccttcctatttaagctattaacttcgttaatatctttgttactaactagctcatattcctttttctgtttatcctctagttgctcaccctgcactggtagagaaaaaacttcttcctcatcgtcagtaactacttttaactctccatcatcagcaatattgccctcagccaaactttcatcatcttccccatcattagttactaactcattcttaactaagttatcatttaatcctactttcttattatccgtatttgataaaggtcttaacttattctctactaagttattaactaaatcatctaaatgaatatctaaaaattcctgtactttccgtgccaccaaagcatctaaatctaactgttcaaattgtaagaggcgatcgcgcagagtcctatccctgtctcctaaaattggcttacctgcatcgtgccacgcctccaataaccgccctaacacccttgccttagaaatcccctcatggagggcgataaactcatcaagaattgaaagctgatgctcactaatcaaaccagaatatttcggtaacgaactaggcataatcaataagtcttaactttattactaactagataataacgaatctacttatctttaagacaattaaagttcctcaagactccatgagacattattaccatttccattttcaaaccaagaaaaaagtttaccctcccccttgacatcatttagtttagtacggcatactcaaattattatcaactaggaaaataaactataaaaaaatggaggaaaactcaaacaatactgattaccgaaaagaattagagaaattagcttcctactttgaaacagagccaaacaaaaaagaagagacatttttttttgcttacagttaataggattctgtcggctattagttgatgactcaatcttgaggcaaaactttttcccaactacttcggtagagtcaaatattctcaatcatatacctcgaagttatgaagaactaaagaagtattttgattttcttgttgaaatgaaagacaagaattttaattactcagcatttgtaccactcaaattacatattagcgataagtctttagttcaagccataggggtattgtcaacggaatggacagaaaaaggaattaaacagttccgaattacagaaggtattttgaatattttttcagaaacgggagaatttttaacttctgagaaattgatagtaggaagatttctaattcctagagaattgatcaagctaatgatccaattagctgatatagataaaggtgatgaaatttattgtccttatgattctttaggtaaattcgccttagaaatcatagaacaagatggacatccctacctagaaatattaggaaatattccaattatctatctggttaacatcctcaacgaaattgatattcaggttagttatagtcatcctatttataacccaagttatatagaaagtgaaaaacggaaaccatttgccaaaagcatttgcattcttcctactggcattaaatacaacaaaaagctgattaatgaaagtttggaaaatttttcactacctcttaacagttggattcatagtgatgcctatgcccttgaatgtcttttagctcagacgaaaaaccgtgctgttattgcacttaatagtacatttttattaagtgcaaaagttcaacaatttcgtgaaagtttggttaagagaaatcttgttgagacagttatcagtttgccttcgggaacaattccttatattttatcccaattctccattatggtattgaacaagaataaaggtaatgacaataatattcgttttatcaatggtataaatgaaaagttttggattcgagaaaatcatcaacctaaattagttcaatgggaatcattaattaaagttagtcgctctgaggctgatgagtttattgttattgatgttagtaaagaaaaggtactggaaaataaaagtagcttagatgttgctcaatatatatattcttctaaagagaaaaaagttgagcaattactttcaaatcaaacaaccaaaactttggctgaagtagtgaatattatttctcctgtttctagtagccacatccgtaataactcatcagacaaaattaaagtcaaggaaatcaccattgatgactttcctgattatgggtatttatctagccctaccaaagagatagatacgattaattacaagcaaaatgaacactttttacgaccctacgacattgttattgtgacaaaaggaagtgtgggtaaagtgggcattactcctccagatgtgccagcgatgggtgaaggaggttgggttgtcaatcaatcttattcaattcttagggctggaaaagaaataagtgccattagtttatatatgtatcttatttctgaagtgggtcagaatgctatttcgaggttagtttcaaaggcaactagacctctaattagacaaggtgaactcaaatatttacccataatcataccaactactgaagaagcccaagagattgagaaaacctttaaccgtatggtgaaaatcaattgtcttaaaagtaagttggtagaaaaacaacaagaactacgcaaaaaacactggtcactatctaagtatgaaaaataattctctggcgggaaatatggaaatcctgaaaatcaaaatttcttaccaattaaaagaggacattaaaactcttgcttatatcaaaggtattactatgaccaaactggtaacagaaattttaggaaatgcttgtcaaaaagctcgtgaaaaaattgaagagattcgttctttaagagcaaaaaaatggagagtacctattttcagaagttaaaactacctcaagccatctaaatatagaaaaagtactagaaaaattactaatttgaaaaatactttttccttaaaagtctttataaataaatgcaaagacaattaactacgctactcatatgagacgagcttcaactggcttcagaatcaaaaactttagaagaagttaagtgcaatgaagacgttggacaaaaaactaacaatcactctgatattgaagaaatatctactccgcctttacaagagaaagagaaattttctaaaaatgaagctaatttattagatgaaaaatcgtcagtaaatagtaatgaagagtctgatagtccaccttgtgtggacataatatctgagaccaatggctacgagcaattacctctaaattctaaacctgattcagatctaagtttatctagcgattcaatgatgaaaacaattaatgataatcccgtaaaaccattgactgataacaaatctaaacatggcattatacaatcacttgagattagtaagatcatcgccactgatgaaacccagtcaagatgtaaattacattcaaaaactattaaggaatatacggaattaatgaagtctggagtaacacttcctcctgtgactatttatgatgacggtgaaaaccactatttagctgatggatttcatcgtttagaggcagccaaaaaatgtggtctatcaacaattaaggctgaagtcaaacaaggttcaaaatccgatgctatcctttattcagtaggtgctaacgcaactcatggtttacgcagaacatctgccgataagagaaaagccgtcgaaactgtgttaaagaatgagaaatggagggagtggagtgataatgaaattgctaaacggtgtggtgttagccatccctttgtgggtaacattagaaaagaattgtatcccaatacggaatctgaagaaagaacttatactgacaagcatggtaatattgttaccatgaaaactggtaatattggcaaaaattctaacaaaaccagtaaaagtaaaacacaagtcgttgaaacgacagagtttactttattcgatatagaatcctcaactcaacctgttaccactcatgagaataaggaagataaaaataataccattgataagagacgttatgtcgaatgtcttcaagaaagtttcgagtttgtcaaaacggaaatattaagggttgcatcttcttctgctgctcaggaaactcaaataagagatgcgtttaacttaattcatggtgttttaacgggttatcttgaagaattgtcttaatttttcattgttctgccaagaatgtgataaagtaataccaacaaaagcaaacatctgttggcagatactttccctatgactattgatacttatcctaagttaaccaatgctaatactgattttgatttggttcgctggtgggtatctactaagtctgttagcagtcgtaaaacttatttgatggtgtataagcagttttctgagtttactggtaaggctttggcagatattgtcatcgaagatattttactctggttggagtcttatcagttacggggggcttctcttaatactattcgtaataagtcttctgccattaagtctctatttaattttgcctgtaaaactggttatctgtccactaatcctagtagtttaatcaagtctgttcagggtaagtatgctctccatgaaagaaggatgagtgaggaggaagttaaaatgttaattatggcggctcgtactcctttggagcaaatggtgattaagttgctctattttttgggtttaagggtttcagaaatgttggatttgaagtggtctcattttcagcctgtggaggggggatattctgtggaggttattggtaaggggatgaagcatcgaattttgtttcttaatcattctctctgggaacagcttcagtctttacctcgtatggagggggctgattttgtttttattaccagtaagggacatcgatatgaccgtcatagtattcatcgtgttataaaaggggttgtccatcgggctggggttaatccccaaatttctgctcactggttacgtcatgcccatgcttctcatagtcttaagcatggagcttccattgagttgttaatgaagtcgttaggtcattcttctttggatttgacttctcgttatctccatattgacgctaatcaatgtaccagtaagtttctcaatatggatgattaactaagactcagggctgagatacgtaaataacctgagttttgaataagctgaaagcattattttctcgtagtcagaaaaccttatagcttcttcttagaaataacgataaaattgccttaacccgaactgacgttaaatatattcaacccctaccatctgcaatctgcaacctgatacctaaccttgttggatattcttaaaccgaactgaggttaaatatttaattcgtaacaactttaggataagagtacgatcgcactcttatagactaatacttgttgggtcagaaaatataagagtaactaataatgttttttatttctaaatgtatttaagttttatcttgtaaaagtagatgtgggttaagtacttgatatgatttagttttagctaagttattgccgccatacgtaaacaccgtaattttgtaagagatttaatataaaaactctactatccctataattttttctattaaactataaaatcttggatgactactttttataaaagaaacataaaaaggagaataacattcaatattatttatataatctgtattgtaaaaatttttagactgaactattccatctattattatcatcaaagttacacttttgatcaaatctttaattgctcctaaatgaggcgtgtcaaaatcattgatcaattccaaaagatattgtccaaagttaattgtacgattacatattttatcaagtttccatgaacaagatgtaatagtaaagagagtgttttcaccattttttttatcactaacaacgtcttctaaatcatcaataagttgaagaaaaactccaaaagcaaataaaaaataatcatggctttcatgtagcaatccagcaactaaataaccatctgttaaaacggaagagcctcctttttgaaaagtgattcccagcacatctaattcgtaaggagagatatttttgtgtaaataaatactattcttttgagcgttatgcgttaataatatgtttgaataaattaaaggatttaaagttctatcatattgtctttctatcaattctattaaattgtaaataatttgttcatcggaatttactggagacaagttaaatccttttaatcttttttctaatctctctataaaatataatttttcttgactgttaatgtctggagaatctaaatagttatctgtataggagtataaaagactataagcaaaaattgaaggtgttaattttatttccaaatttaacaaaatttgtattaagtacattactccaacatttcttaaagattgaaaaacactttctacactaattttttggtcaaattcttttgctttattaataaaactgataacggcatcaaaaaaacctgaagaaaacataatttcaaaatgttcattttgaaacttgaatactatttgagtaaagtactttattttagcagaaatttctgtttcaaaaatattgactaattcttcattattaatagacccttctgataattttaaaaaacattcgtaaataaccccttcaatatcatctaagaattgatctaaagctttttgattatttaatttttcccttttattaattttttctcccatattgggaaactcagtttcagtattccaccatttatttaaaagactactgtgtatagcgttaaatcttgtcatatcgatttcaaaaaacgagttatgataatactatcatatccaatcataattaattaaaagtaatatcttaggtatgcgtaattacattaagtatttgttattctttggttttattttttcgcttcctataaaacctttattagcacaacaagtagaaagaccaattcaaggttgtacaataaaatctgataatttagaacaaggtttttctattttaaaaaatcctaacaatcaagaaggttgtagatttgaccatacttttagtaaaagttctgttaattatcttttaaatgtggatttatatgacggagaaaatcctaattcaaaaattgaagtaataaatattaataataatcaacaatatagttttaaaataccttactttgattggagaacaggattggatattaattttattaatctttatcagactgatagaccatcccttgttatacagcgtagtgaatctagtcaaggagcaggagggtgttatacggatatagttttttttgatcctagtataatatctggttataataaggttagtgctgaacaagtaaatttaggtgattctaagggttcaatacgtacttgtttcgagtatgaagatatagatggggatggtattatggaagtcttaggtcatgattttagatttgcttataagtttagtagtggagcaggttctggaatacctaaaaaagtgatgaaattaaagcctaatggtttagttgacgtttccagaaactataaaggttttctgagaaaacaagcatctgagttttgggatgatgttttggaacaaagcagaaattataaattttattattatggatctatgactggttatatggctgtaaaaactttattgggagaatataaagatgcaaagtctctagttattaaaagaataaaagctgatggtcaaactaatactccagaagcgaaagaatttttgtctggtattgataatttattacgtcaaacaaaatacttaaaataggtttttataa

SEQ ID NO: 3 - protein, 1061 aa, Cyanobacterium sp. ABICyano1
MILGKPSNSQPLNKRNFQNPDHIKEWQQSAISQDLIAENLVSVANGFDVLFIGNKYRTNTGVLSRHILNSYSHLEDGGSYGRTFDPFTNKEMQWVQFKPNRPRKGSTGKVIKYESPKGEPTRVLMPFVPMKIWQRISDKFGVPINPKKDTHFWEWVKNNPSIPIAITEGNKKANCLLSYGYPAIAFVGIWNGLEKINDFSKEKQLKEDLKWLLSNGNRNINIIFDQDQKQKTVINVNKAIFALSSLISRNGHKVNIVQWLPSKGKGIDDYLVALPFEKRENHLDNLIKIAPSFNFWSTKYLFKCRKPDLTVNCRYLSDAVKELPQEDIALIAPHGTGKTSLVATHVKNRSYHGRKTISLVHLESLAKANGNALGLYYRTENNIEKQYLGFSLCVDSCRDKINGITTDIISGQDYCLFIDEIDQVIPHILNSETEVSKYRCTIIDTFSELVRNAEQVIIADADLSDVTIDLIENIRGKKLYVIKNEYQYQGMTFNAVGSPLEMMAMMGKSVSEGKKLFINTTSQKAKSKYGTIALESYIFGLNKEAKILRIDSETTKNPEHPAYKIIDQDLNNILKDYDYVIASPCLQTGVSITLKGHFDQQFNFSSGNITPHCFLQQMWRLRDAEIERFYYVPNSSNLNLIGNKSSSPSDLLKSNNKMATATVNLLGRIDSEYSLEYESHGIWLETWAKLSARHNSSMRCYSEILTYLITSQGHKLNINIPSPLADIKKLNDEVSSNREKVKNERYSQRLNSPDINDAEATILESKEQKIGLTLNERCTLEKHKVKKRYGNVKMDILTFDDDGLYPKLRLFYYLTIGKPHLKANDRKAIAKMGNDNKGKILSKDLVNKTYSARVKVLEILKLTDFIDNLRDELLITPNNPAITDFNNLLLRAKKDLRVLGVNIGKYPMANINAVLTLIGHKLSVMRDEFGKEKRIKVDGKSYRCYQLETLPDFTNDTLDYWLENDSQKEVTATENYSENFNPSNSYNPDSKTLSEGANFLYINKEELHPNKLHLEIKEGAELFLFGVKVIVKGILDGAVTIFSMGQEYDLSLNELEGMLTS

SEQ ID NO: 4 - protein, 61 aa, Cyanobacterium sp. ABICyano1
MLNDGTFVQIFDIYHDHALGVTLDLKTEKIISDDVRVITVKDLLFDGTYKGVKSFMPDNAR

SEQ ID NO: 5 - protein, 254 aa, Cyanobacterium sp. ABICyano1
MNKTSKGLNRYEIHLSDKLMSEIESIAMMEGAKVHHISKKPIIKDTVISLLELGIKAVYEGVELPKKPNDTNTDNDNRINLSVLDNRIEEKLKPLYSLVSELTDKLNRIANTDKDSYSDIDTDTVTEYELIGIEKTEDSLVTSILDNVQTEEKAPSECPTLPPDEDLGDKLPEREIMVKIERLINELGIQEGLIEKEGKEKLAKLCTEIIGKKVTVERLSRVAKGTELFIAPCEFWHFFKAERDGNKWAWTRIK

SEQ ID NO: 6 - protein, 228 aa, Cyanobacterium sp. ABICyano1
MVKKLVGYVRVSSESQEDNTSLQNQIERIEAYCMAFGYELVKIFKEVATGTKADIETRPIFNEAIEYLKQDNANGIIALKLDRIARNALDVLRLVRETLEPQNKMLVLLDIQVDTSTPSGKMILTVMSAVAELERDMIYDRTQGGRKTKAQKGGYAYGKPKFGYKTEEKELKEDSAQQETIKLIKRHRRSGKSYQKIADYLNAQSIPTKQGKKWSSSVVYRICQEKAG

SEQ ID NO: 7 - protein, 87 aa, Cyanobacterium sp. ABICyano1
MNNKYLWTNHARKRLTERWEIKESWVIDTIENPERSEFIVDESGEKYHYYKRIAKFKNRVLEVITSANSTPTRIITFYFNRNMRKNL

SEQ ID NO: 8 - protein, 82 aa, Cyanobacterium sp. ABICyano1
MIVTYDNEVDAIYFKLTENKIDSTEPQTDRIIIDYDESNNIVGIEVLDFNYLVKKGLTVADLPFSEDERLTASQYFNFPVAI

SEQ ID NO: 9 - DNA, 327 bp, Cyanobacterium sp. ABICyano1
tgagaaaaagtgtaaacaaatattaagaaaaagatcagaaaaatttaacaacacgtaataaaaaaatgcgtcactacgggttataaatttacatgaaaggttaaaacacttttctgagacgattttgataaaaaagttgtcaaaaaattaagtttctttacaaatgcttaacaaaaacttggttttaagcacaaaataagagagactaatttgcagaagttttacaaggaaatcttgaagaaaaagatctaagtaaaacgactctgtttaaccaaaatttaacaaatttaacaaaacaaactaaatctattaggagattaactaagc

SEQ ID NO: 10 - DNA, 283 bp, Cyanobacterium sp. ABICyano1
tcgacaattaataacttcttcctgtacgggcgaatggccatttgctcctaactaactccgtactgctttgcggaacgagcgtagcgaactctccgaattactaagccttcatccctgatagatgcaaaaaacgaattaaaattatgtgtaaaaagaaaatgtgtctttatttagtagtcaaagttacaaaatattaagaatcaaattaataatgtattgggcagttaagtatataagtctttaaatatttatttgtattcaatatattaaccgaggacaaatt

SEQ ID NO: 11 - DNA, 205 bp, Cyanobacterium sp. ABICyano1
tagagtatgataaaatgacaaggaaaggattattttctcttgtttaaattctcaagattcttatgcttatttattttatgtaagtgtctcttttccttgaaatagaaagaaaaaagtggctaattttgagaaaagctaacaacgctttggttaactaaaaatcaaaagtgagattactgatcgcttaagaaatggagtattgatt

SEQ ID NO: 12 - DNA, 214 bp, Cyanobacterium sp. ABICyano1
agagttatatttacatagtgtgtgcgagtaagggcaacttttgtaggtagatgaataaacctcaaattactcatcttaaaagacgatatttttaatctattcttctgtaataaaatacttctttcgatagagatatttaatacttttgagagatgaaaataatttcaataattgtcatgatagagagtaagtgcaaataagaaaaaattgattt

SEQ ID NO: 13 - DNA, 338 bp, Cyanobacterium sp. ABICyano1
gcagttagataaataagtaatgagcgggagaaataggggcaaatggccattcgcccctacagggaggtggcaggtgttagggtgtttaggggatgaggtgatgagggtagagggagataaggtgtcgggtttcagatttcaggttttagaagaaagtaacgagtaattatcaactattcactattcactattgcctgttgcccttctctccttgaaatataaaaaaatgtaaaaatatcattaagaaaagtaacaaaataaacagaaaggttgacaaagttgacgctttaatatccgtatgttagctttataacaacgaaatcaacggaggagtgaaa

SEQ ID NO: 14 - DNA, 408 bp, Cyanobacterium sp. ABICyano1
cttgaaaaagttgaggtattaatagagcttgataaatgataataaaaacagatttagctcttattttaagggaaaaagaaataaataaaatattagtaaatatcaaaaatatcagcctttcaaaaataatttgactcttttcaaaaaaaaatgttatctttaaggtatgctttaaaccttaaatacttctattggtaacactgttctcaatcttatttcagattttcccattgagcataaataaaatattaagcagaagtagaaaaggttgatattagcaataataaaaattaacaataaaatgtgaaaacagattactactgattatttattgccatgagctaattagtaataatttgtcttttttgatcgaaaaatgaaattttttaagcggaggaactgaaaatt

SEQ ID NO: 15 - DNA, 411 bp, Cyanobacterium sp. ABICyano1
tatttatatataaactcgaataaaattatcaatataaagtcaaactatatctatcctattttaactgctattggtaagtcccttaattagtgttggggtgaatagattttaaaagggcaaacccccctttatcctccctcgagaggggggagggcaaaaggcaaggggcaagggaaaaattaagaattaagaattaaaaactccgaacacctgtaggggcgaatagccattcgcttcccctcatccccccatctccccaacaccctaagcccctactcgttactcatttatttacatcatttatttacatcattaagaaaagtaacaaattttgacaagtagtcttttgacaggaaaaagcaaattctcgaagatgaaaacaatagaaaaaaattcaatcttacagtaacg

SEQ ID NO: 16 - DNA, 211 bp, Cyanobacterium sp. ABICyano1
gtgatatttggtttattctatattttccttaagtaaaaattcagtcatgagggaaacttttgttaaaatttgctttaaattaataggaagatcattaagaaaatcttaaaaagattgagtttttagatcgaaattattgaagaaaaattaacaggggttctgctcaaaattttattaaattactctactgtagtaaaggagaaattttatt

SEQ ID NO: 17 - DNA, 542 bp, Cyanobacterium sp. ABICyano1
gaatagttgataattactcgttactcattactcacttaaacctgccacctgatacctgccacctctccccccatcacctcatcccctcaacattccgaaccccttgacactttgaactaaaattgtattaaagtgcaaatctggacggggttaaccagtgtgacttataatagtaaacgctgttttttataataaataagctaaatatttaaaaactatgagtaaatatacactaaatggtactagacgtaagcagaaaagaacctccggtttccgcgcccgtatgagaaccaaaaatggtagaaaagtaattcaagctcgtcgtaataagggtagaaaaagattagcagtataaaattactgttaaataaggaagctaagtttagcattttaagtttgatattactaatcattaaatttactgtgaaatataggtgggactaccatcaaagcatcgactgaaacggcgtttaaatttccaatctgtttatcaacagggtattcgccgctctagtcgttattttattgtccgagggttacgg

SEQ ID NO: 18 - DNA, 380 bp, Cyanobacterium sp. ABICyano1
ataaccaatgggacttgaattttagatccatttatttaattctatttttgttacatttctttatattaatcagaattatgttactttgttttgttttatgtcgttaccttattgaagaaagagtggatgagaaggtaaatgacggggcataaatatcgattcgttgtcagaataagctgttttattcacttaactggttgtttgccaatttctccctaattcccataacttgtataactaaatttaataatcaattttagtaaattaagaataggttaaaagtagtatttagaattaagttaactttaataaatttcctgtatttttttatagaaaaaagtataaaataaaaacatatcaaaaaagtttgaaatgacaat

SEQ ID NO: 19 - DNA, 359 bp, Cyanobacterium sp. ABICyano1
cctcaactacaagttcttttatatattactttaacctgagttttggataagctgaaagcattattttctcgtagtcagaaaaccttatagcttcttagaaataacgataaaattaccttaatccgaactgacgttaaatatattcacccctatcaccccaaaaccctaagcccctacttccccctttcccttcatcacctcatccccccatcccctaacacttaaccttattctttattcttaaaccgaactgaggtgaagttgcagaatacccatggggggttacagcattgtagaaaaataaatattctttcattattaaggttgtttggtaaaaatatgtgaaaaccctaataatt

SEQ ID NO: 20 - DNA, 239 bp, Cyanobacterium sp. ABICyano1
ggggacagacatatttttatcataatggtaaattcataataattttagacttttttttgcaaaaattaatctcactctcttctttccctatctcccattgtttcttatatcccaatgccccaatacccaaagctcagaaaataggtattagcgaagaggtgttgatcccctcccctagcaaaatatactcctatatagtaaagtgagaaagtgaagaaataagatcaagttcgcaattt

SEQ ID NO: 21 - DNA, 496 bp, Cyanobacterium sp. ABICyano1
caaatcacgagaatttatgtagggactattttgggttgacggtggagagtatgtcgcccttgaattatgacccgaagatgaagatgtcggggaggtggaaggacggtctttaagaggtttaacatcaaagttggtcataatctctgtccctgtttgataactactatttaattttgagttgttttaggtacatcaaaatacccaaatccttactctcccctcaatatacaacaaaaaaaactttttgattcactttagtcataaaaattagaatttatctaccgaaatattacataaatgtaatgtatatattttctgatttattccgtgtgagccatgattcataatttataattcataatttctaaatatgcccctacaatggatatagaatgtcattttaattataggtatcataatcgtggtagttactccggaaaaaactattgaatcaaattcagtctcacctgctacagatagagtagccgttattctt

SEQ ID NO: 22 - DNA, 290 bp, Cyanobacterium sp. ABICyano1
ttgacgattgtattgacttacgccaaatggcttaccctcatagtgaatagttgataattaagaattaaaaatcccgttcacgacagaagggagtgtaagagccttcggtgcgaactctcatcttccctgaaacctgacacctgaaacctgacacctgaaacctgacacctcatctccctaatcccctaattttaatgaaaaaataccctgagtgggcattgaaaaaaaagaaaagttgttcgactatgaaataagaattctgcacttcgtgagaaaaaaggaaatgaaat

SEQ ID NO: 23 - DNA, 355 bp, Cyanobacterium sp. ABICyano1
ctatttaactaggaaaaggtaaagttaaaaggacaagggtaaataattaaaaattaagaattaagaacttctaactctcattactcattacttatttcctcctctcaccccttctcctgatcacctcttctcctcaatactcggaactcatttccccatggtgtgacactcaaatcaaaagtctgttattgactttcagatgaaatattactatgataacaatatcccccctatgggtatataaaaatatgagcgatattagttaaaaatcaaatttggattttttttctgaaaatattttaagattaagtaaagataagtaaagaaattataagcaattttgttaaatcatacc

SEQ ID NO: 24 - DNA, 619 bp, Cyanobacterium sp. ABICyano1
ctcacactgaaaatattgccacaagaaataaagatcaagcaataatcctgactaaaaaggaataaagtaattatccttttcctgatatgttatctgacttgttgtttcttagtcatgttccttccatttttatttttgtttttatcatttttattacaaaaatttcttaatagggctaaagcatttagttagttttttagctctcaacaagttgactaatcaatataatgccctaagttaatttgcccttggtttgacggaggatattggaaaaaagaaacttctcgttgtatttcacagggaaaagggggaaattttattaataactaaacaatagaaaataattatttatttatattattttgtgaacaaatgttcaagaattaaagtgtaataagaaaatttatttttttatatttatttaaaacttagatataagcctaaaggtctgaaattattattagacaatcaattgattcagaggtaatagttttttacttaaaaatattttttcaaaattatcccctatttgggtattgaaaaataaataaattcaagtaataatatacagaataaaggaaaatctaatcttaaaaattttgtgtgtgaggaattgaaa

SEQ ID NO: 25 - DNA, 190 bp, Cyanobacterium sp. ABICyano1
tatcaccattgtagaaaagccagaaaatcaattaacacaaatttcctgtaaattattatgtatgattttccccttctccccttaaaaggagaaataaaaaactatatcccccaaccaccgataagcattgtgagagaaaaatcatttaggtaggatcaatgctgtaaccgataaagataaataaataatt

SEQ ID NO: 26 - DNA, 536 bp, Cyanobacterium sp. ABICyano1
attctgtgaattgattagatttgaggttttttaagaggttgattaccttgcctccaaaaaaatcataacacactaatgctctatatgaaagggctttagacccataggtttttgagaaaaaaacttgctaactctcggacaatgtcagcataactaaagtcaattcttttcgtactttataattgtctataatttaatatacaactgttctgaaactagtttttctctacattccttagttttatctgagtaaggttgcttgtaacttaacttcggttgggcctaaaaatatccgattaggagcaggtgtcagactttaattaattattaattattaattgcttattgccaaccctcggcgacaccactttttcatcagccccagataaagattgatgttttagttttgtttctttttatcccctaattcaactaatacaagtaaaactaaggttgtttatcaaaaatgatggttgatgtttgggtaaattttaagatattatgaaaagaaaatgaataaaaaatgaaaaatcttt

SEQ ID NO: 27 - DNA, 283 bp, Cyanobacterium sp. ABICyano1
ctacaggggcaagatttggcggaaatctatatgtggattctctttcaagtgaagaaggtgcagtgccgacttatctggacttattagaatacgatattcgcactattactaatggtttgttagcaggagtgaacaattaaaaattttttcctaattgacgaataaaaaatcaatgtcaactaatagttaacaatactctctgaaaaccaaaaattgtcaaccaaaacataacataatttttacccaaaaacctcatttataaactttaaggataaaatcaatg

SEQ ID NO: 28 - DNA, 299 bp, Cyanobacterium sp. ABICyano1
gggattagagagttcaaagttaggaatgaggtgtcaggttttaggtttcaggtttaggggagcaatgagaaagaggtttcaggtttcaggtgtcaggttgcaggtgtcacaggtgatgaggggatgggggatgagggggaaacaagtaagtaataagtgttcggagtttttaattcttaattcttaatttttcctttgcctcttgccttttgccttgtcttaattactaatttctaattaaaatgattgtgttttctagtttagtctcatggttacttgaacccttacagcatagtttt

SEQ ID NO: 29 - DNA, 414 bp, Cyanobacterium sp. ABICyano1
ttacaaacggcgggaattattatggtagtagcgatgttagtaaccccgggtgcgatcgcatatttacttacagatcgttttgatcaaatgttaatcttatcaatagttagtagtgttctatcttgtgttttaggcacttatttaagttatcattttgatgtttctacggggggaagtattgtcgttttaatgaccataatttttattttagcgatgatttttgctcctaaatatggcatcatcaatcaaaataccaaaatatattctgcttaacttgtttactgatacttcaaataatcatataacctatcttccgagttaaaaataatggatattatccaactgaggtcgagaatagagtttcttttttgatagaatttttttacaccagttattcattactatcatgggata

SEQ ID NO: 30 - DNA, 412 bp, Cyanobacterium sp. ABICyano1
taatatagtgattattataaatgcaatgtgaatcaaacctatattttaccgtacattgaccatggaacttaatttgaggtgattagtagagggtgcgatcgccctatttgtcaaataataaagataacatttgacattgctgattgaagacataaaacacagaaaaaatcaggtaaaaatataaagctaaagtctaaatatggtttacttttgccttcgacttacaacaaaaaatcatagctagaatcaccaacgcctaatattttatttagctgaaattttgggatgaactttttgtaaaaatcgggggtctaaaaatatagcaaccacgatattaaataactgagtgattattttaatctattgggggcttattaactaaatacttgcatttttatggagggttttaatt

SEQ ID NO: 31 - DNA, 364 bp, Cyanobacterium sp. ABICyano1
aaagattattttctacagaagcaaccctttcatcttccgaattttcaggaatttcctgcttttgtttctgaatattagcataggcggcttttgcccactctaaagaaggttgagactgaatttctgaggtttcagaaggagcattagattgtttatcttcaacaacaggaggtttttgttcaatattttccttattctcttttttacggcgaaaccaattaaacataatgattgtgcataaatattcgttaatatattgtaaccctagaaaggaatcggtttcaggtttatccccagagaatgtgaacctttacagaaagtaaaaagtctaaaatcgtagcaacaataaatcacagaaattgag

SEQ ID NO: 32 - DNA, 234 bp, Cyanobacterium sp. ABICyano1
atctagtaataatcatcaagagttgttaaaacttcactatcaagaattggtagcaagaggattacaacatctgagtttagatcatcgagcagttattgttcttcatgatttggaagatttaccacaacaggaaatagcggaaatattatctattccccttggtacggtcaaatctcgtttattcaaagccagaaaaaatttgcgtcaatttttagaacttgaaggtattagctt

SEQ ID NO: 33 - DNA, 246 bp, Cyanobacterium sp. ABICyano1
ccaatatcttgtcatacatacttatttgcctcactattagccctatatgtctctattgtatttttctttttctcctattcctagatcttgtaatgaatcattactctctgaaatatagctactaattttatggttgtttgtaaaatatattaacaaatgaacaataaatcatattttgtgttaatctaattattagacaactactgaatttatattcagatattcacagataggagaattttgatt

SEQ ID NO: 34 - DNA, 346 bp, Cyanobacterium sp. ABICyano1
attctattaccctccgagggtggctatctccttttatttggtggctgataaaaccctattctattaaagtagccaatgagttagttaatgcggcggctaaatgtcactaaaatttcatcttaggttcacatcaaagtcatatcggttgtttatagtattaagtgtcagggagaaagataggttttcctctttagctccttcgcacctttaatccctgactttttttatttttttgttcgtgtgattaatctatttgtgtagcaattatttttatcttattttcttttcagtctagtaattaattatttttatattttgtattatttttagagaggtttgagctgtt

SEQ ID NO: 35 - DNA, 320 bp, Cyanobacterium sp. ABICyano1
gaatatctcatccttagcttctacttataccttcagcatagttaaaaatcatccctttattgatggtaataaaagaacaggttttattagtggagtaacctttttaatgctcaatggttctcactttactgcttctgaagtggaagtagtacatatcatccaaaccttagctagtggcagaattaccgaggaagaattacaacaatggttcgtaaggaaaagtaagcagatgaataattaaagcatcatttcatcctcatttcatattctcctgtcaccatggtatggaagattaggtaaaaatgaggaaaaagtttatt

SEQ ID NO: 36 - DNA, 304 bp, Cyanobacterium sp. ABICyano1
gcgattatcaaccacgaaaacatacaattattatcaaacctgctgagaaattatccacagaaatagatgtttctgcgaagggaaaatgggcttttcattgccatttaatgtatcacatggatgtgggaatgtttcggactattaatgttatttcctaaaaaataatagtattaaagcctaaaatttttataaaaaaattcatgtcttttattagggtgagcattcttcctttatgtctccttattttacctctttagaggtaactacaaacttaatcaaaaaatttagataattaattatatca

SEQ ID NO: 37 - DNA, 309 bp, Cyanobacterium sp. ABICyano1
atacatggttggttcactgacttttaccccagttttctctttgaacaattggcataactctgaaaaaatcagatcgggcttttgttgaattatttgttcaatcaaagcaaaaccgtgattgtctattttcttttttttcccaccactcatagataaaaatttatcccgaactcaggttatattaagttcggatgatcacttaagataattgatcagattggttaagatagagaaaaattctttttcatagtgatttcataattgatagttacaataacgattattatttagtaaaaagattttcaaatc

SEQ ID NO: 38 - DNA, 330 bp, Cyanobacterium sp. ABICyano1
tggtcaagttactatatgtttagaaacaacaaaaaaagaagtcattataaaaataattgatacaggaattggcattaataaagaagaacaaaaattaatttttaatcgtttttatcgaatcaataaagcaagaaatagagagaaaggcagttgcggattaggtttagctattgcaaatgcgatcgcgcttaatcatggtggtagaataattttagaaagtcaagaaaatcaaggcagtatttttaccgtttatttaccgaaaatcatttcatcctaatttcatattcttttgacagaatcaaaggtaaagataaaaagagagaaacagtc

SEQ ID NO: 39 - DNA, 490 bp, Cyanobacterium sp. ABICyano1
catctttacttttgactaacatttcataggtatcatgacgaaaattttttagtctgttatatttgttcatgtagagagattttaatttgtgattattttattttctctctatttttcttttttgtcttgtccttcctcatttttctctacatttagtctaaactacagctctttaatcttcagtttctctttcctcctcttcctcatcaaggtaatcatcccaattaatatcttcttcttgttctaatttgggttgagattgttgtttatcaatcatatttcatactcctaaaactttcttacttatttatcagttactttttacccatttatgcaatagtgtagaaatttttttcgatcgagttaattaatttttatttcaaccatatctaaataattcttgatggacattctagttaactagaaggtttaagctaaaaataattattgatattgccttcggtataactaactatatccagagaaaaag

SEQ ID NO: 40 - DNA, 433 bp, Cyanobacterium sp. ABICyano1
tttatatataaactcgaataaaattatcaatataaagtcaaactatatctatcctattttaactgctattggtaagtcccttaattagtgttggggtgaatagattttaaaagggcaaacccccctttatcctccctcgagaggggggagggcaaaaggcaaggggcaagggaaaaattaagaattaagaattaaaaactccgaacacctgtaggggcgaatagccattcgcttcccctcatccccccatctccccaacaccctaagcccctactcgttactcatttatttacatcatttatttacatcattaagaaaagtaacaaattttgacaagtagtcttttgacaggaaaaagcaaattctcgaagatgaaaacaatagaaaaaaattcaatcttacagtaacgatgaaaaaacttttaggcttaatt

SEQ ID NO: 41 - DNA, 306 bp, Cyanobacterium sp. ABICyano1
ctcaagagatagttaaaaaacaaatagctttagtctatcaattaatcgaattatttttacaaacaaattttcataaacccatagaactagaggaggaagttatttatgtttaaaaatctaaaagagttttatattcccctaaaacccccttagtaagagtgacttttttcatcatttgcctgtaaattctcctcttttaataagagagctagggtgttttaaaagaggattttattgctttccaattctaactacttcaaaaacttattttatactcaataatttattaatcaagaggaaattacc

SEQ ID NO: 42 - DNA, 12968 bp, Cyanobacterium sp. ABICyano1
aatatttttcgtcagatacgcaaaccttacaaacataattaacaactgaaactattgatatgtctaggttttagctctatcacaggttggatctgtcgacaattaataacttcttcctgtacgggcgaatggccatttgctcctaactaactccgtactgctttgcggaacgagcgtagcgaactctccgaattactaagccttcatccctgatagatgcaaaaaacgaattaaaattatgtgtaaaaagaaaatgtgtctttatttagtagtcaaagttacaaaatattaagaatcaaattaataatgtattgggcagttaagtatataagtctttaaatatttatttgtattcaatatattaaccgaggacaaattatgaattcttataccgtgggtacttatttagccgaacgcttagtgcaaattggtttaaaacatcattttgccgtggctggggactataatttagtgttattggataacttattattaaataaaaacatggaacaagtgtattgttgtaatgaattaaattgtggtttttctgctgaaggttatgctagagctaaaggtgcagctgctgctgttgttacttattctgtgggtgctttatctgcttttgatgctattggtggtgcttatgccgaaaatttacccgtgattttaatttctggtgcccctaataataatgatcatgccgctggacatgttttacatcatgccttaggtaaaaccgattatcattatcaattagaaatggccaaaaatattactgctgctgccgaagctatttatactcctgaagaagcccctgccaaaattgatcatgtgattaaaaccgccttacgcgaaaaaaaacccgtgtatttagaaattgcctgtaatattgcttctatgccttgtgctgctcctgggcctgcttctgctttatttaatgatgaagcctctgatgaagctagtttaaatgctgccgtggaagaaaccttaaaatttattgccaatcgcgataaagttgccgtgttagttggttctaaattaagagctgctggtgctgaagaagctgctgttaaatttgctgatgctttaggtggtgcagttgctactatggctgctgccaaatctttttttcccgaagaaaatccccattatattggaactagttggggagaagtttcttatcctggtgtggaaaaaactatgaaagaagccgacgctgttattgctttagcccctgtgtttaatgattattctaccactggttggactgatattcccgatcccaaaaaattagttttagccgaacctcgttctgttgttgttaatggtgttcgctttccctctgtgcatttaaaagattatttaacccgcttagcccaaaaagtttctaaaaaaactggtgccttagatttttttaaatctttaaatgcgggtgaattaaaaaaagctgctcctgctgatccttctgctcctttagttaatgctgaaattgcccgtcaagttgaagccttattaacccctaatactaccgttattgccgaaactggtgattcttggtttaatgcccaacgcatgaaattacctaatggtgcccgtgttgaatatgaaatgcaatggggtcatattggttggtctgtacctgctgcttttggttatgctgttggtgctcctgaacgtcgtaatattttaatggtgggtgatggttcttttcaattaactgcccaagaagttgcccaaatggttcgcttaaaattacccgttattatttttttaataaataattatggttataccattgaagtgatgattcatgatgggccatataataatattaaaaattgggattatgcgggtttaatggaagtgtttaatggtaatggtggttatgattctggtgctggtaaaggtttaaaagccaaaactggtggtgaattagctgaagctattaaagttgccttagccaatactgatgggccaaccttaattgaatgttttattggtcgcgaagattgtaccgaagaattagttaaatggggtaaacgtgttgctgctgctaattctcgcaaacccgtgaataaattattgtaatttttggggatcaattcgagctcggtacccaaactagtatgtagggtgaggttatagctagcgcttttaattaatccgcggatttgtattcaatatattaaccgaggacaacatatgattaaagcctatgctgccttagaagccaatggtaaattacaaccctttgaatatgatcctggtgctttaggtgccaatgaagtggaaattgaagtgcaatattgtggtgtgtgtcattctgatttatctatgattaataatgaatggggtatttctaattatcccttagttcctggtcatgaagttgttggtactgttgctgctatgggtgaaggtgttaatcatgtggaagtgggtgatttagttggtttaggttggcattctggttattgtatgacctgtcattcttgtttatctggttatcataatttatgtgccactgccgaatctactattgtgggtcattatggtggttttggtgatagagttcgtgctaaaggtgtttctgtggtgaaattacccaaaggtattgatttagcctctgctgggcctttattttgtggtggtattaccgttttttctcccatggtggaattatctttaaaacctaccgccaaagttgctgttattggtattggtggtttaggtcatttagccgttcaatttttaagagcctggggttgtgaagttactgcttttacctcttctgcccgtaaacaaaccgaagttttagaattaggtgcccatcatattttagattctaccaatcctgaagctattgcttctgccgaaggtaaatttgattatattatttctaccgtgaatttaaaattagattggaatttatatatcagtaccttagcccctcaaggtcattttcattttgttggtgtggtgttagaacccttggacttaaacttatttcccttattaatgggacaacgttctgtttctgcttctcctgttggttctcctgctactattgccactatgttagattttgccgtgcgtcatgatattaaacccgtggtggaacaattttcttttgatcaaattaatgaagccattgcccatttagaatctggtaaagcccattatcgcgtggtgttatctcattctaaaaattaataagattaacttctaaactgaaacaaatttgagggtaggcttcattgtctgcccttatttttttatttaggaaaagtgaacagactaaagagtgttggctctattgctttgagtatgtaaattaggcgttgctgaattaaggtatgatttttgaccccttctctcttctgcagttacctaggatttctggcgaaagggggatgtgctgcaaggcgattaagttgggtaacgccagggttttcccagtcacgacgttgtaaaacgacggccagtgagcgcgacgtaatacgactcactatagggcgaattggcggaaggccgtcaaggccgcatggcgcgcctacgtagacaattgtcgatgtaattattaactatcttattatagatgaggggagagggagaaattagttcggagagaacgctcgagcgctcgttccgcaaagcggtacggagttagttaggggctaatgggcattctcccgtacaggaaagagttagaagttattaattatcaacaattctcctttgcctagtgcatcgttacctttttaattaaaacataaggaaaactaataatcgtaataatttaacctcaaagtgtaaagaaatgtgaaattctgacttttataacgttaaagagggaaaaattagcagtttaaaatacctagagaatagtctggggtaagcatagagaattagattagttaagttaatcaaattcagaaaaaataataatcgtaaatagttaatctgggtgtatagaaaatgatccccttcatgataagatttaaactcgaaaagcaaaagccaaaaaactaacttccattaaaagaagttgttacatataacgctataaagaaaatttatatatttggaggataccaaccatgtctcatattcaacgtgaaactagttgttctcgtcctcgtttaaattctaatatggatgccgatttatatggttataaatgggctcgtgataatgttggtcaatctggtgctactatttatcgtttatatggtaaacctgatgctcctgaattattcttgaaacatggtaaaggttctgttgctaatgatgttactgatgaaatggttcgtttaaactggttgactgaatttatgcctttacctactattaaacattttattcgtactcccgatgatgcttggttattaactactgctattcctggtaaaactgcttttcaagttttagaagaatatcctgattctggtgaaaatattgttgatgctttagctgtttttttacgtcgtttacattctattcccgtttgtaattgtccttttaattctgatcgtgtttttcgtttagctcaagctcaatctcgtatgaataatggtttagttgatgcttctgattttgatgatgaacgtaatggttggcctgttgaacaagtttggaaagaaatgcacaaattgttacctttttctcctgattctgttgttactcatggtgatttttctttagataatttgatctttgatgaaggtaaattgattggttgtattgatgttggtcgtgttggtattgctgatcgttatcaagatttagctattttatggaattgtttaggtgaattttctccttctttacagaaacgtttatttcagaaatatggtattgataatcctgatatgaacaagttacaatttcatttaatgttggacgagttcttttaagaattaattcatgaccaaaatcccttaacgtgagttttcgttccactgagcgtcagaccccgtagaaaagatcaaaggatcttcttgagatcctttttttctgcgcgtaatctgctgctatttaaattacgtacacgtgttattactttgttaacgacaattgtcttaattaactgggcctcatgggccttccgctcactgcccgctttccagtcgggaaacctgtcgtgccagctctgcagatgacggtgaaaacctctgacacatgcagctcccggagacggtcacagcttgtctgtaagcggatgccgggagcagacaagcccgtcagggcgcgtcagcgggtgttggcgggtgtcggggcgcagccatgacccagtcacgtagcgatagcggagtgtatactggcttaactatgcggcatcagagcagattgtactgagagtgcaccatatgcggtgtgaaataccgcacagatgcgtaaggagaaaataccgcatcaggcgctcttccgcttcctcgctcactgactcgctgcgctcggtcgttcggctgcggcgagcggtatcagctcactcaaaggcggtaatacggttatccacagaatcaggggataacgcaggaaagaacatgtgagcaaaaggccagcaaaaggccaggaaccgtaaaaaggccgcgttgctggcgtttttccataggctccgcccccctgacgagcatcacaaaaatcgacgctcaagtcagaggtggcgaaacccgacaggactataaagataccaggcgtttccccctggaagctccctcgtgcgctctcctgttccgaccctgccgcttaccggatacctgtccgcctttctcccttcgggaagcgtggcgctttctcatagctcacgctgtaggtatctcagttcggtgtaggtcgttcgctccaagctgggctgtgtgcacgaaccccccgttcagcccgaccgctgcgccttatccggtaactatcgtcttgagtccaacccggtaagacacgacttatcgccactggcagcagccactggtaacaggattagcagagcgaggtatgtaggcggtgctacagagttcttgaagtggtggcctaactacggctacactagaaggacagtatttggtatctgcgctctgctgaagccagttaccttcggaaaaagagttggtagctcttgatccggcaaacaaaccaccgctggtagcggtggtttttttgtttgcaagcagcagattacgcgcagaaaaaaaggatctcaagaagatcctttgatcttttctactgcagaagcttgttagacaccctgtcatgtattttatattatttatttcaccatacggattaagtgaaacctaatgaaaatagtactttcggagctttaactttaatgaaggtatgtttttttatagacatcgatgtctggtttaacaataggaaaaagtagctaaaactcccatgaattaaagaaataacaaggtgtctaacaacctgttattaagaatgttagaaaagacttaacatttgtgttgagtttttatagacattggtgtctagacatacggtagataaggtttgctcaaaaataaaataaaaaaagattggactaaaaaacatttaatttagtacaatttaattagttattttttcgtctcaaattttgctttgttgagcagaaatttagataaaaaaatccccgtgatcagattacaatgtcgttcattgtacgatgtgtcgaaaaatctttacgacactctaaactgaccacacgggggaaaaagaaaactgaactaataacatcatgatactcggaaaacctagcaattctcaacccctaaacaaaagaaacttccaaaaccctgaccatataaaggagtggcaacaatcagcaatcagtcaagatttgatagcagaaaatcttgtatcggttgctaatggttttgatgtactatttatcggcaataaataccgaactaacacgggtgttctgtcacggcacatattaaactcctattctcatttagaagatggtggttcgtatggtagaacatttgacccatttaccaataaagaaatgcagtgggttcaatttaaaccgaatagaccaagaaaaggttctactggtaaggtaatcaaatatgaatcgccaaaaggtgaacctacaagagttctaatgccgtttgtgcctatgaaaatatggcaacggattagcgataagttcggagtaccgattaatccgaaaaaagatactcacttttgggaatgggtaaagaataatccatcgataccgattgccattacagaaggaaataaaaaagctaattgcctattatcctatggctatcctgctattgcctttgtaggcatttggaacggattagagaaaataaatgatttctcgaaggaaaagcagttaaaagaggatttgaaatggttgttatccaacggcaaccgaaatattaatatcatctttgaccaagaccagaaacaaaaaactgtaattaatgtaaacaaagctattttcgctttatcttctctaataagtagaaatggtcataaagttaatattgtgcaatggttgccgtcaaaaggtaaaggaatagatgattatttggtagctttaccttttgagaaaagagaaaatcatttagacaacttaattaaaattgcaccatcatttaatttttggtcaactaaatacttattcaagtgtcgtaaaccagatttaaccgtaaattgccgttatttgagcgatgcagtaaaagaattacctcaagaggatatagcattaatagcacctcacggcacgggtaaaacttcattagtagctactcacgttaagaatcggagttatcacggaaggaaaactatttcattggtgcatcttgaaagtttagccaaagctaatggcaacgcacttggattatattaccgaaccgaaaataatattgaaaagcaatatcttggatttagcttatgtgtagatagttgccgtgataagattaacggcattacaactgatattatttcaggtcaagattattgccttttcattgatgaaattgaccaagtaattccacacatccttaacagtgaaactgaagtaagtaagtatagatgcaccatcattgacactttttctgaactggtgagaaatgctgaacaggtcattattgctgatgctgatttatccgatgtgacgattgacctaatagaaaacatcagaggtaaaaaactatatgtaatcaagaatgaatatcagtatcagggaatgacttttaacgccgttggttcaccattagaaatgatggcaatgatgggaaaatcggtgtcagaaggcaagaaattatttattaacaccacatcccaaaaggcaaaaagtaagtacggcacaatcgctcttgagtcttatatttttggtctaaataaagaagcaaagatattaagaatagactctgaaaccactaaaaaccctgaacatccagcctataaaatcattgaccaagacttaaataatatcctcaaagattatgattatgtcattgcctcaccttgccttcaaacaggtgtcagtattaccttaaaagggcattttgaccagcaatttaacttttccagtggaaacattacacctcattgctttttacagcaaatgtggcggttgagggatgcagaaattgaaagattctattatgtgccgaactcatctaacctcaatctcattgggaataagtcaagttcaccatcagaccttctaaagagcaataacaagatggcaacggcaacggttaaccttttgggtagaatcgactccgaatattccctagagtatgaatcgcacggcatttggcttgagacgtgggcaaaattatcagcacggcataacagttcaatgcgttgttactctgaaattcttacctatctaattacgtctcaagggcataaattaaatatcaacattccctcacctcttgcagatattaagaagctaaatgatgaggtaagtagtaacagggaaaaggtaaaaaatgagagatactctcagaggttaaactcaccagatattaacgatgcagaagctaccatactcgaatctaaagagcaaaaaatcggattgactctcaatgagagatgcaccctagaaaagcataaagttaagaagcggtatgggaatgtaaagatggatattctcacctttgatgatgatggactataccccaaactcagactattttattacctcaccatcggtaaacctcatctcaaggctaatgacagaaaagctattgccaaaatgggcaatgacaataaaggcaagattctatcaaaagacttagttaataaaacttactccgctcgtgtgaaggtcttagagattcttaaactaactgactttatcgacaatcttagagatgaactcttaataactcccaataatccagctatcaccgattttaataatcttctgctaagagctaagaaggatttaagagtattaggagtcaacatcggaaaatatccaatggccaacattaatgccgtacttactctcattggtcacaaactttctgtaatgagagatgagttcggaaaagagaaaaggataaaagtagatggtaaatcataccgatgttatcaacttgaaacattaccagattttaccaatgatactcttgactactggttagaaaatgatagccaaaaagaagtaacagcaacagaaaattactccgaaaattttaacccttcaaatagctacaatccagacagtaagacactttcagagggtgcaaatttcctatatataaataaagaagaattgcatccaaataaattgcacctagaaataaaagaaggtgctgaactttttttattcggggtaaaggtgattgtgaaaggaatcttggacggggcagtaactatattctctatgggtcaagaatacgatttatccctcaatgaactagaggggatgttaacatcatgaactttacaagaatctttttaaagggcgatcgcaccatgttaaatgatggtacatttgttcagatatttgatatttaccatgaccacgcattgggagtgacccttgaccttaagacagaaaaaattatttccgatgatgttagggtaattactgtcaaagacttattgttcgatggcacttataaaggggtaaaatcttttatgcccgataatgcccgataatgcccgattgatgctacaaaatcccataatcataagcgataatcccctaatagcttgtaattcttgaaccgtagcgattttagagtattccaaaaagaagaaataaacaccgcaaaatgtcgtatttcacatatataaaccaaggttttttgccctaaaatctttatgtttgtagtgtgatgttgggtcaaaatggtcagaaaagttgcaaggtttttatggatgcttacgcgcgcgaggggtaagcatccccaaatagttactttatcctagtccatgcccatttattgccgtcccgttcggctttaaaaaagtgccaaaactcacaaggtgcaataaaaagttctgtacctttcgcaaccctagataatctttcaacagttactttttttcctattatctcggtacaaagtttggctagtttctcttttccctctttttcaatcaagccttcttgtatgcccaactcattgattaatctctctatttttaccattatttcccgttcaggtagtttatcccctaaatcttcatcggggggcaatgtagggcattctgaaggggctttttcttctgtctggacattatctaatattgaagtaaccaaactatcttcagttttttctattcctattaattcatattcggttactgtatccgtatcaatatccgaataactatctttatccgtattagctattcggttaagtttatccgttaactcagaaacaagactatatagcggttttagcttttcttctatcctgttatctaatacggataagtttatacggttatcattatccgtattagtatcattgggcttttttggtagttctaccccctcataaaccgcttttattcccaattccaacagactgataacagtatcctttataatgggttttttgctgatatggtgaacttttgccccttccatcattgcgatactttctatctcactcatcaacttatcgcttaagtgaatctcgtatctgtttaatcccttactggttttattcatatccgtttactttattcggttaacaattctattttatacgaataaaatattatacggttaactttatacgtttaactattttatctatacggataacagtaataagttattcgtattagttatacgtttacttttatccaaataaaattagtgcatttaaactaaaagaatgattttatcggagttgatagcattggattaacctaaagatgtttataagctatatctgataagtatttaaggttattttgttattctgtttattgacattatcagaataaaagaatagaatataattgttgagagataagaggtttaagtgattatggttaagaagttagttggttatgtcagggtcagtagtgaatcgcaagaggataacactagcttacagaatcagatagagagaattgaagcatattgtatggcttttggttatgagttggtaaaaatattcaaagaggttgccactggtacaaaagcagatattgaaacccgtcctatttttaatgaagctatagaatacttgaaacaggataatgctaatggaattattgccttgaagctagaccgaatcgcacggaatgctttagatgtattgcgtttggttcgtgaaaccttagaaccacaaaataaaatgttagtgttactagatattcaggtagatacttcgacaccttcaggaaaaatgattttaactgtaatgagtgccgttgctgaactcgaaagagacatgatctatgatcgcactcaggggggtagaaagactaaagcccaaaagggcgggtatgcctacgggaaacctaaatttggctataagactgaagaaaaggaactaaaagaagattcagcacaacaggaaactattaaactaattaagagacaccgtaggtcagggaaaagctaccagaaaatagctgattatctcaatgcccaaagtattcccactaaacaaggtaagaaatggagttctagcgtcgtctatcgaatctgtcaggaaaaagctggttaagtctgtttatagatatttagaatttattgaataaaaatagtatgaacaataaatatttatggactaaccacgctcggaaacgtttaactgaacgatgggaaataaaagaatcatgggttattgataccatcgaaaatcctgaacgttcagaatttattgttgatgagtcaggggaaaaatatcattactataaaagaatagctaagtttaagaatagagtgttagaagtgataacttctgccaactcaacacccacaagaataataaccttttactttaaccgtaacatgaggaaaaatttatgattgttacttacgataatgaagttgacgcaatttattttaagttaacggaaaataaaattgatagcaccgaacctcaaacagacaggattatcattgattacgatgaaagtaataatattgttggcattgaggtattagattttaattatcttgtcaagaaaggtttaaccgttgctgatttacctttttctgaagatgaaagattaacagcttctcaatattttaattttcctgttgctatctaatccagaaggggcaataatccccttctttcatcgagttagacttaatatcacaaaagtcattttcattttaccgtttcttttccacagcgtccgtacgcccctcgttaaatctcaaaaccgacaatttatgatgtttataaaaagttactcactttaataagtatttatactcattaaagggttattctttttttgtagcctgataggttgggaaggaatatttcagattatcagatttgttg

SEQ ID NO: 43 - DNA, 13449 bp, Cyanobacterium sp. ABICyano1
aatatttttcgtcagatacgcaaaccttacaaacataattaacaactgaaactattgatatgtctaggttttagctctatcacaggttggatctgtcgacaattaataacttcttcctgtacgggcgaatggccatttgctcctaactaactccgtactgctttgcggaacgagcgtagcgaactctccgaattactaagccttcatccctgatagatgcaaaaaacgaattaaaattatgtgtaaaaagaaaatgtgtctttatttagtagtcaaagttacaaaatattaagaatcaaattaataatgtattgggcagttaagtatataagtctttaaatatttatttgtattcaatatattaaccgaggacaaattatgaattcttataccgtgggtacttatttagccgaacgcttagtgcaaattggtttaaaacatcattttgccgtggctggggactataatttagtgttattggataacttattattaaataaaaacatggaacaagtgtattgttgtaatgaattaaattgtggtttttctgctgaaggttatgctagagctaaaggtgcagctgctgctgttgttacttattctgtgggtgctttatctgcttttgatgctattggtggtgcttatgccgaaaatttacccgtgattttaatttctggtgcccctaataataatgatcatgccgctggacatgttttacatcatgccttaggtaaaaccgattatcattatcaattagaaatggccaaaaatattactgctgctgccgaagctatttatactcctgaagaagcccctgccaaaattgatcatgtgattaaaaccgccttacgcgaaaaaaaacccgtgtatttagaaattgcctgtaatattgcttctatgccttgtgctgctcctgggcctgcttctgctttatttaatgatgaagcctctgatgaagctagtttaaatgctgccgtggaagaaaccttaaaatttattgccaatcgcgataaagttgccgtgttagttggttctaaattaagagctgctggtgctgaagaagctgctgttaaatttgctgatgctttaggtggtgcagttgctactatggctgctgccaaatctttttttcccgaagaaaatccccattatattggaactagttggggagaagtttcttatcctggtgtggaaaaaactatgaaagaagccgacgctgttattgctttagcccctgtgtttaatgattattctaccactggttggactgatattcccgatcccaaaaaattagttttagccgaacctcgttctgttgttgttaatggtgttcgctttccctctgtgcatttaaaagattatttaacccgcttagcccaaaaagtttctaaaaaaactggtgccttagatttttttaaatctttaaatgcgggtgaattaaaaaaagctgctcctgctgatccttctgctcctttagttaatgctgaaattgcccgtcaagttgaagccttattaacccctaatactaccgttattgccgaaactggtgattcttggtttaatgcccaacgcatgaaattacctaatggtgcccgtgttgaatatgaaatgcaatggggtcatattggttggtctgtacctgctgcttttggttatgctgttggtgctcctgaacgtcgtaatattttaatggtgggtgatggttcttttcaattaactgcccaagaagttgcccaaatggttcgcttaaaattacccgttattatttttttaataaataattatggttataccattgaagtgatgattcatgatgggccatataataatattaaaaattgggattatgcgggtttaatggaagtgtttaatggtaatggtggttatgattctggtgctggtaaaggtttaaaagccaaaactggtggtgaattagctgaagctattaaagttgccttagccaatactgatgggccaaccttaattgaatgttttattggtcgcgaagattgtaccgaagaattagttaaatggggtaaacgtgttgctgctgctaattctcgcaaacccgtgaataaattattgtaatttttggggatcaattcgagctcctccgcttaaaaaatttcatttttcgatcaaaaaagacaaattattactaattagctcatggcaataaataatcagtagtaatctgttttcacattttattgttaatttttattattgctaatatcaaccttttctacttctgcttaatattttatttatgctcaatgggaaaatctgaaataagattgagaacagtgttaccaatagaagtatttaaggtttaaagcataccttaaagataacatttttttttgaaaagagtcaaattatttttgaaaggctgatatttttgatatttactaatattttatttatttctttttcccttaaaataagagctaaatctgtttttattatcatttatcaagctctattaatacctcaactttttcaagaaaaaataataataatttttccctctattctcatgaccttttaggaaaattaattttagaaaaactattgacaaacccataaaaaatgagataagattatagattgtcactggtattttatactagaggcaaattatatttatatatacaaaaatgctgtataaaaaacatctcatatgattaaagcctatgctgccttagaagccaatggtaaattacaaccctttgaatatgatcctggtgctttaggtgccaatgaagtggaaattgaagtgcaatattgtggtgtgtgtcattctgatttatctatgattaataatgaatggggtatttctaattatcccttagttcctggtcatgaagttgttggtactgttgctgctatgggtgaaggtgttaatcatgtggaagtgggtgatttagttggtttaggttggcattctggttattgtatgacctgtcattcttgtttatctggttatcataatttatgtgccactgccgaatctactattgtgggtcattatggtggttttggtgatagagttcgtgctaaaggtgtttctgtggtgaaattacccaaaggtattgatttagcctctgctgggcctttattttgtggtggtattaccgttttttctcccatggtggaattatctttaaaacctaccgccaaagttgctgttattggtattggtggtttaggtcatttagccgttcaatttttaagagcctggggttgtgaagttactgcttttacctcttctgcccgtaaacaaaccgaagttttagaattaggtgcccatcatattttagattctaccaatcctgaagctattgcttctgccgaaggtaaatttgattatattatttctaccgtgaatttaaaattagattggaatttatatatcagtaccttagcccctcaaggtcattttcattttgttggtgtggtgttagaacccttggacttaaacttatttcccttattaatgggacaacgttctgtttctgcttctcctgttggttctcctgctactattgccactatgttagattttgccgtgcgtcatgatattaaacccgtggtggaacaattttcttttgatcaaattaatgaagccattgcccatttagaatctggtaaagcccattatcgcgtggtgttatctcattctaaaaattaataagattaacttctaaactgaaacaaatttgagggtaggcttcattgtctgcccttatttttttatttaggaaaagtgaacagactaaagagtgttggctctattgctttgagtatgtaaattaggcgttgctgaattaaggtatgatttttgaccccttctctcttctgcagttacctaggatttctggcgaaagggggatgtgctgcaaggcgattaagttgggtaacgccagggttttcccagtcacgacgttgtaaaacgacggccagtgagcgcgacgtaatacgactcactatagggcgaattggcggaaggccgtcaaggccgcatggcgcgcctacgtagacaattgtcgatgtaattattaactatcttattatagatgaggggagagggagaaattagttcggagagaacgctcgagcgctcgttccgcaaagcggtacggagttagttaggggctaatgggcattctcccgtacaggaaagagttagaagttattaattatcaacaattctcctttgcctagtgcatcgttacctttttaattaaaacataaggaaaactaataatcgtaataatttaacctcaaagtgtaaagaaatgtgaaattctgacttttataacgttaaagagggaaaaattagcagtttaaaatacctagagaatagtctggggtaagcatagagaattagattagttaagttaatcaaattcagaaaaaataataatcgtaaatagttaatctgggtgtatagaaaatgatccccttcatgataagatttaaactcgaaaagcaaaagccaaaaaactaacttccattaaaagaagttgttacatataacgctataaagaaaatttatatatttggaggataccaaccatgtctcatattcaacgtgaaactagttgttctcgtcctcgtttaaattctaatatggatgccgatttatatggttataaatgggctcgtgataatgttggtcaatctggtgctactatttatcgtttatatggtaaacctgatgctcctgaattattcttgaaacatggtaaaggttctgttgctaatgatgttactgatgaaatggttcgtttaaactggttgactgaatttatgcctttacctactattaaacattttattcgtactcccgatgatgcttggttattaactactgctattcctggtaaaactgcttttcaagttttagaagaatatcctgattctggtgaaaatattgttgatgctttagctgtttttttacgtcgtttacattctattcccgtttgtaattgtccttttaattctgatcgtgtttttcgtttagctcaagctcaatctcgtatgaataatggtttagttgatgcttctgattttgatgatgaacgtaatggttggcctgttgaacaagtttggaaagaaatgcacaaattgttacctttttctcctgattctgttgttactcatggtgatttttctttagataatttgatctttgatgaaggtaaattgattggttgtattgatgttggtcgtgttggtattgctgatcgttatcaagatttagctattttatggaattgtttaggtgaattttctccttctttacagaaacgtttatttcagaaatatggtattgataatcctgatatgaacaagttacaatttcatttaatgttggacgagttcttttaagaattaattcatgaccaaaatcccttaacgtgagttttcgttccactgagcgtcagaccccgtagaaaagatcaaaggatcttcttgagatcctttttttctgcgcgtaatctgctgctatttaaattacgtacacgtgttattactttgttaacgacaattgtcttaattaactgggcctcatgggccttccgctcactgcccgctttccagtcgggaaacctgtcgtgccagctctgcagatgacggtgaaaacctctgacacatgcagctcccggagacggtcacagcttgtctgtaagcggatgccgggagcagacaagcccgtcagggcgcgtcagcgggtgttggcgggtgtcggggcgcagccatgacccagtcacgtagcgatagcggagtgtatactggcttaactatgcggcatcagagcagattgtactgagagtgcaccatatgcggtgtgaaataccgcacagatgcgtaaggagaaaataccgcatcaggcgctcttccgcttcctcgctcactgactcgctgcgctcggtcgttcggctgcggcgagcggtatcagctcactcaaaggcggtaatacggttatccacagaatcaggggataacgcaggaaagaacatgtgagcaaaaggccagcaaaaggccaggaaccgtaaaaaggccgcgttgctggcgtttttccataggctccgcccccctgacgagcatcacaaaaatcgacgctcaagtcagaggtggcgaaacccgacaggactataaagataccaggcgtttccccctggaagctccctcgtgcgctctcctgttccgaccctgccgcttaccggatacctgtccgcctttctcccttcgggaagcgtggcgctttctcatagctcacgctgtaggtatctcagttcggtgtaggtcgttcgctccaagctgggctgtgtgcacgaaccccccgttcagcccgaccgctgcgccttatccggtaactatcgtcttgagtccaacccggtaagacacgacttatcgccactggcagcagccactggtaacaggattagcagagcgaggtatgtaggcggtgctacagagttcttgaagtggtggcctaactacggctacactagaaggacagtatttggtatctgcgctctgctgaagccagttaccttcggaaaaagagttggtagctcttgatccggcaaacaaaccaccgctggtagcggtggtttttttgtttgcaagcagcagattacgcgcagaaaaaaaggatctcaagaagatcctttgatcttttctactgcagaagcttgttagacaccctgtcatgtattttatattatttatttcaccatacggattaagtgaaacctaatgaaaatagtactttcggagctttaactttaatgaaggtatgtttttttatagacatcgatgtctggtttaacaataggaaaaagtagctaaaactcccatgaattaaagaaataacaaggtgtctaacaacctgttattaagaatgttagaaaagacttaacatttgtgttgagtttttatagacattggtgtctagacatacggtagataaggtttgctcaaaaataaaataaaaaaagattggactaaaaaacatttaatttagtacaatttaattagttattttttcgtctcaaattttgctttgttgagcagaaatttagataaaaaaatccccgtgatcagattacaatgtcgttcattgtacgatgtgtcgaaaaatctttacgacactctaaactgaccacacgggggaaaaagaaaactgaactaataacatcatgatactcggaaaacctagcaattctcaacccctaaacaaaagaaacttccaaaaccctgaccatataaaggagtggcaacaatcagcaatcagtcaagatttgatagcagaaaatcttgtatcggttgctaatggttttgatgtactatttatcggcaataaataccgaactaacacgggtgttctgtcacggcacatattaaactcctattctcatttagaagatggtggttcgtatggtagaacatttgacccatttaccaataaagaaatgcagtgggttcaatttaaaccgaatagaccaagaaaaggttctactggtaaggtaatcaaatatgaatcgccaaaaggtgaacctacaagagttctaatgccgtttgtgcctatgaaaatatggcaacggattagcgataagttcggagtaccgattaatccgaaaaaagatactcacttttgggaatgggtaaagaataatccatcgataccgattgccattacagaaggaaataaaaaagctaattgcctattatcctatggctatcctgctattgcctttgtaggcatttggaacggattagagaaaataaatgatttctcgaaggaaaagcagttaaaagaggatttgaaatggttgttatccaacggcaaccgaaatattaatatcatctttgaccaagaccagaaacaaaaaactgtaattaatgtaaacaaagctattttcgctttatcttctctaataagtagaaatggtcataaagttaatattgtgcaatggttgccgtcaaaaggtaaaggaatagatgattatttggtagctttaccttttgagaaaagagaaaatcatttagacaacttaattaaaattgcaccatcatttaatttttggtcaactaaatacttattcaagtgtcgtaaaccagatttaaccgtaaattgccgttatttgagcgatgcagtaaaagaattacctcaagaggatatagcattaatagcacctcacggcacgggtaaaacttcattagtagctactcacgttaagaatcggagttatcacggaaggaaaactatttcattggtgcatcttgaaagtttagccaaagctaatggcaacgcacttggattatattaccgaaccgaaaataatattgaaaagcaatatcttggatttagcttatgtgtagatagttgccgtgataagattaacggcattacaactgatattatttcaggtcaagattattgccttttcattgatgaaattgaccaagtaattccacacatccttaacagtgaaactgaagtaagtaagtatagatgcaccatcattgacactttttctgaactggtgagaaatgctgaacaggtcattattgctgatgctgatttatccgatgtgacgattgacctaatagaaaacatcagaggtaaaaaactatatgtaatcaagaatgaatatcagtatcagggaatgacttttaacgccgttggttcaccattagaaatgatggcaatgatgggaaaatcggtgtcagaaggcaagaaattatttattaacaccacatcccaaaaggcaaaaagtaagtacggcacaatcgctcttgagtcttatatttttggtctaaataaagaagcaaagatattaagaatagactctgaaaccactaaaaaccctgaacatccagcctataaaatcattgaccaagacttaaataatatcctcaaagattatgattatgtcattgcctcaccttgccttcaaacaggtgtcagtattaccttaaaagggcattttgaccagcaatttaacttttccagtggaaacattacacctcattgctttttacagcaaatgtggcggttgagggatgcagaaattgaaagattctattatgtgccgaactcatctaacctcaatctcattgggaataagtcaagttcaccatcagaccttctaaagagcaataacaagatggcaacggcaacggttaaccttttgggtagaatcgactccgaatattccctagagtatgaatcgcacggcatttggcttgagacgtgggcaaaattatcagcacggcataacagttcaatgcgttgttactctgaaattcttacctatctaattacgtctcaagggcataaattaaatatcaacattccctcacctcttgcagatattaagaagctaaatgatgaggtaagtagtaacagggaaaaggtaaaaaatgagagatactctcagaggttaaactcaccagatattaacgatgcagaagctaccatactcgaatctaaagagcaaaaaatcggattgactctcaatgagagatgcaccctagaaaagcataaagttaagaagcggtatgggaatgtaaagatggatattctcacctttgatgatgatggactataccccaaactcagactattttattacctcaccatcggtaaacctcatctcaaggctaatgacagaaaagctattgccaaaatgggcaatgacaataaaggcaagattctatcaaaagacttagttaataaaacttactccgctcgtgtgaaggtcttagagattcttaaactaactgactttatcgacaatcttagagatgaactcttaataactcccaataatccagctatcaccgattttaataatcttctgctaagagctaagaaggatttaagagtattaggagtcaacatcggaaaatatccaatggccaacattaatgccgtacttactctcattggtcacaaactttctgtaatgagagatgagttcggaaaagagaaaaggataaaagtagatggtaaatcataccgatgttatcaacttgaaacattaccagattttaccaatgatactcttgactactggttagaaaatgatagccaaaaagaagtaacagcaacagaaaattactccgaaaattttaacccttcaaatagctacaatccagacagtaagacactttcagagggtgcaaatttcctatatataaataaagaagaattgcatccaaataaattgcacctagaaataaaagaaggtgctgaactttttttattcggggtaaaggtgattgtgaaaggaatcttggacggggcagtaactatattctctatgggtcaagaatacgatttatccctcaatgaactagaggggatgttaacatcatgaactttacaagaatctttttaaagggcgatcgcaccatgttaaatgatggtacatttgttcagatatttgatatttaccatgaccacgcattgggagtgacccttgaccttaagacagaaaaaattatttccgatgatgttagggtaattactgtcaaagacttattgttcgatggcacttataaaggggtaaaatcttttatgcccgataatgcccgataatgcccgattgatgctacaaaatcccataatcataagcgataatcccctaatagcttgtaattcttgaaccgtagcgattttagagtattccaaaaagaagaaataaacaccgcaaaatgtcgtatttcacatatataaaccaaggttttttgccctaaaatctttatgtttgtagtgtgatgttgggtcaaaatggtcagaaaagttgcaaggtttttatggatgcttacgcgcgcgaggggtaagcatccccaaatagttactttatcctagtccatgcccatttattgccgtcccgttcggctttaaaaaagtgccaaaactcacaaggtgcaataaaaagttctgtacctttcgcaaccctagataatctttcaacagttactttttttcctattatctcggtacaaagtttggctagtttctcttttccctctttttcaatcaagccttcttgtatgcccaactcattgattaatctctctatttttaccattatttcccgttcaggtagtttatcccctaaatcttcatcggggggcaatgtagggcattctgaaggggctttttcttctgtctggacattatctaatattgaagtaaccaaactatcttcagttttttctattcctattaattcatattcggttactgtatccgtatcaatatccgaataactatctttatccgtattagctattcggttaagtttatccgttaactcagaaacaagactatatagcggttttagcttttcttctatcctgttatctaatacggataagtttatacggttatcattatccgtattagtatcattgggcttttttggtagttctaccccctcataaaccgcttttattcccaattccaacagactgataacagtatcctttataatgggttttttgctgatatggtgaacttttgccccttccatcattgcgatactttctatctcactcatcaacttatcgcttaagtgaatctcgtatctgtttaatcccttactggttttattcatatccgtttactttattcggttaacaattctattttatacgaataaaatattatacggttaactttatacgtttaactattttatctatacggataacagtaataagttattcgtattagttatacgtttacttttatccaaataaaattagtgcatttaaactaaaagaatgattttatcggagttgatagcattggattaacctaaagatgtttataagctatatctgataagtatttaaggttattttgttattctgtttattgacattatcagaataaaagaatagaatataattgttgagagataagaggtttaagtgattatggttaagaagttagttggttatgtcagggtcagtagtgaatcgcaagaggataacactagcttacagaatcagatagagagaattgaagcatattgtatggcttttggttatgagttggtaaaaatattcaaagaggttgccactggtacaaaagcagatattgaaacccgtcctatttttaatgaagctatagaatacttgaaacaggataatgctaatggaattattgccttgaagctagaccgaatcgcacggaatgctttagatgtattgcgtttggttcgtgaaaccttagaaccacaaaataaaatgttagtgttactagatattcaggtagatacttcgacaccttcaggaaaaatgattttaactgtaatgagtgccgttgctgaactcgaaagagacatgatctatgatcgcactcaggggggtagaaagactaaagcccaaaagggcgggtatgcctacgggaaacctaaatttggctataagactgaagaaaaggaactaaaagaagattcagcacaacaggaaactattaaactaattaagagacaccgtaggtcagggaaaagctaccagaaaatagctgattatctcaatgcccaaagtattcccactaaacaaggtaagaaatggagttctagcgtcgtctatcgaatctgtcaggaaaaagctggttaagtctgtttatagatatttagaatttattgaataaaaatagtatgaacaataaatatttatggactaaccacgctcggaaacgtttaactgaacgatgggaaataaaagaatcatgggttattgataccatcgaaaatcctgaacgttcagaatttattgttgatgagtcaggggaaaaatatcattactataaaagaatagctaagtttaagaatagagtgttagaagtgataacttctgccaactcaacacccacaagaataataaccttttactttaaccgtaacatgaggaaaaatttatgattgttacttacgataatgaagttgacgcaatttattttaagttaacggaaaataaaattgatagcaccgaacctcaaacagacaggattatcattgattacgatgaaagtaataatattgttggcattgaggtattagattttaattatcttgtcaagaaaggtttaaccgttgctgatttacctttttctgaagatgaaagattaacagcttctcaatattttaattttcctgttgctatctaatccagaaggggcaataatccccttctttcatcgagttagacttaatatcacaaaagtcattttcattttaccgtttcttttccacagcgtccgtacgcccctcgttaaatctcaaaaccgacaatttatgatgtttataaaaagttactcactttaataagtatttatactcattaaagggttattctttttttgtagcctgataggttgggaaggaatatttcagattatcagatttgttg

SEQ ID NO: 44 - DNA, 13033 bp, Cyanobacterium sp. ABICyano1
aatatttttcgtcagatacgcaaaccttacaaacataattaacaactgaaactattgatatgtctaggttttagctctatcacaggttggatctgtcgacaattaataacttcttcctgtacgggcgaatggccatttgctcctaactaactccgtactgctttgcggaacgagcgtagcgaactctccgaattactaagccttcatccctgatagatgcaaaaaacgaattaaaattatgtgtaaaaagaaaatgtgtctttatttagtagtcaaagttacaaaatattaagaatcaaattaataatgtattgggcagttaagtatataagtctttaaatatttatttgtattcaatatattaaccgaggacaaattatgaattcttataccgtgggtacttatttagccgaacgcttagtgcaaattggtttaaaacatcattttgccgtggctggggactataatttagtgttattggataacttattattaaataaaaacatggaacaagtgtattgttgtaatgaattaaattgtggtttttctgctgaaggttatgctagagctaaaggtgcagctgctgctgttgttacttattctgtgggtgctttatctgcttttgatgctattggtggtgcttatgccgaaaatttacccgtgattttaatttctggtgcccctaataataatgatcatgccgctggacatgttttacatcatgccttaggtaaaaccgattatcattatcaattagaaatggccaaaaatattactgctgctgccgaagctatttatactcctgaagaagcccctgccaaaattgatcatgtgattaaaaccgccttacgcgaaaaaaaacccgtgtatttagaaattgcctgtaatattgcttctatgccttgtgctgctcctgggcctgcttctgctttatttaatgatgaagcctctgatgaagctagtttaaatgctgccgtggaagaaaccttaaaatttattgccaatcgcgataaagttgccgtgttagttggttctaaattaagagctgctggtgctgaagaagctgctgttaaatttgctgatgctttaggtggtgcagttgctactatggctgctgccaaatctttttttcccgaagaaaatccccattatattggaactagttggggagaagtttcttatcctggtgtggaaaaaactatgaaagaagccgacgctgttattgctttagcccctgtgtttaatgattattctaccactggttggactgatattcccgatcccaaaaaattagttttagccgaacctcgttctgttgttgttaatggtgttcgctttccctctgtgcatttaaaagattatttaacccgcttagcccaaaaagtttctaaaaaaactggtgccttagatttttttaaatctttaaatgcgggtgaattaaaaaaagctgctcctgctgatccttctgctcctttagttaatgctgaaattgcccgtcaagttgaagccttattaacccctaatactaccgttattgccgaaactggtgattcttggtttaatgcccaacgcatgaaattacctaatggtgcccgtgttgaatatgaaatgcaatggggtcatattggttggtctgtacctgctgcttttggttatgctgttggtgctcctgaacgtcgtaatattttaatggtgggtgatggttcttttcaattaactgcccaagaagttgcccaaatggttcgcttaaaattacccgttattatttttttaataaataattatggttataccattgaagtgatgattcatgatgggccatataataatattaaaaattgggattatgcgggtttaatggaagtgtttaatggtaatggtggttatgattctggtgctggtaaaggtttaaaagccaaaactggtggtgaattagctgaagctattaaagttgccttagccaatactgatgggccaaccttaattgaatgttttattggtcgcgaagattgtaccgaagaattagttaaatggggtaaacgtgttgctgctgctaattctcgcaaacccgtgaataaattattgtaatttttggggatcaattcgagctcgccttactataaacaaaagttatctgagaaataactataactattctgaaaatatttgacaaaactttacaattttgttatattagtaagtgaggtgagcaaatcacccaaaatatataagtacctcgaaaaattcataactgaaatcataagcatatgattaaagcctatgctgccttagaagccaatggtaaattacaaccctttgaatatgatcctggtgctttaggtgccaatgaagtggaaattgaagtgcaatattgtggtgtgtgtcattctgatttatctatgattaataatgaatggggtatttctaattatcccttagttcctggtcatgaagttgttggtactgttgctgctatgggtgaaggtgttaatcatgtggaagtgggtgatttagttggtttaggttggcattctggttattgtatgacctgtcattcttgtttatctggttatcataatttatgtgccactgccgaatctactattgtgggtcattatggtggttttggtgatagagttcgtgctaaaggtgtttctgtggtgaaattacccaaaggtattgatttagcctctgctgggcctttattttgtggtggtattaccgttttttctcccatggtggaattatctttaaaacctaccgccaaagttgctgttattggtattggtggtttaggtcatttagccgttcaatttttaagagcctggggttgtgaagttactgcttttacctcttctgcccgtaaacaaaccgaagttttagaattaggtgcccatcatattttagattctaccaatcctgaagctattgcttctgccgaaggtaaatttgattatattatttctaccgtgaatttaaaattagattggaatttatatatcagtaccttagcccctcaaggtcattttcattttgttggtgtggtgttagaacccttggacttaaacttatttcccttattaatgggacaacgttctgtttctgcttctcctgttggttctcctgctactattgccactatgttagattttgccgtgcgtcatgatattaaacccgtggtggaacaattttcttttgatcaaattaatgaagccattgcccatttagaatctggtaaagcccattatcgcgtggtgttatctcattctaaaaattaataagattaacttctaaactgaaacaaatttgagggtaggcttcattgtctgcccttatttttttatttaggaaaagtgaacagactaaagagtgttggctctattgctttgagtatgtaaattaggcgttgctgaattaaggtatgatttttgaccccttctctcttctgcagttacctaggatttctggcgaaagggggatgtgctgcaaggcgattaagttgggtaacgccagggttttcccagtcacgacgttgtaaaacgacggccagtgagcgcgacgtaatacgactcactatagggcgaattggcggaaggccgtcaaggccgcatggcgcgcctacgtagacaattgtcgatgtaattattaactatcttattatagatgaggggagagggagaaattagttcggagagaacgctcgagcgctcgttccgcaaagcggtacggagttagttaggggctaatgggcattctcccgtacaggaaagagttagaagttattaattatcaacaattctcctttgcctagtgcatcgttacctttttaattaaaacataaggaaaactaataatcgtaataatttaacctcaaagtgtaaagaaatgtgaaattctgacttttataacgttaaagagggaaaaattagcagtttaaaatacctagagaatagtctggggtaagcatagagaattagattagttaagttaatcaaattcagaaaaaataataatcgtaaatagttaatctgggtgtatagaaaatgatccccttcatgataagatttaaactcgaaaagcaaaagccaaaaaactaacttccattaaaagaagttgttacatataacgctataaagaaaatttatatatttggaggataccaaccatgtctcatattcaacgtgaaactagttgttctcgtcctcgtttaaattctaatatggatgccgatttatatggttataaatgggctcgtgataatgttggtcaatctggtgctactatttatcgtttatatggtaaacctgatgctcctgaattattcttgaaacatggtaaaggttctgttgctaatgatgttactgatgaaatggttcgtttaaactggttgactgaatttatgcctttacctactattaaacattttattcgtactcccgatgatgcttggttattaactactgctattcctggtaaaactgcttttcaagttttagaagaatatcctgattctggtgaaaatattgttgatgctttagctgtttttttacgtcgtttacattctattcccgtttgtaattgtccttttaattctgatcgtgtttttcgtttagctcaagctcaatctcgtatgaataatggtttagttgatgcttctgattttgatgatgaacgtaatggttggcctgttgaacaagtttggaaagaaatgcacaaattgttacctttttctcctgattctgttgttactcatggtgatttttctttagataatttgatctttgatgaaggtaaattgattggttgtattgatgttggtcgtgttggtattgctgatcgttatcaagatttagctattttatggaattgtttaggtgaattttctccttctttacagaaacgtttatttcagaaatatggtattgataatcctgatatgaacaagttacaatttcatttaatgttggacgagttcttttaagaattaattcatgaccaaaatcccttaacgtgagttttcgttccactgagcgtcagaccccgtagaaaagatcaaaggatcttcttgagatcctttttttctgcgcgtaatctgctgctatttaaattacgtacacgtgttattactttgttaacgacaattgtcttaattaactgggcctcatgggccttccgctcactgcccgctttccagtcgggaaacctgtcgtgccagctctgcagatgacggtgaaaacctctgacacatgcagctcccggagacggtcacagcttgtctgtaagcggatgccgggagcagacaagcccgtcagggcgcgtcagcgggtgttggcgggtgtcggggcgcagccatgacccagtcacgtagcgatagcggagtgtatactggcttaactatgcggcatcagagcagattgtactgagagtgcaccatatgcggtgtgaaataccgcacagatgcgtaaggagaaaataccgcatcaggcgctcttccgcttcctcgctcactgactcgctgcgctcggtcgttcggctgcggcgagcggtatcagctcactcaaaggcggtaatacggttatccacagaatcaggggataacgcaggaaagaacatgtgagcaaaaggccagcaaaaggccaggaaccgtaaaaaggccgcgttgctggcgtttttccataggctccgcccccctgacgagcatcacaaaaatcgacgctcaagtcagaggtggcgaaacccgacaggactataaagataccaggcgtttccccctggaagctccctcgtgcgctctcctgttccgaccctgccgcttaccggatacctgtccgcctttctcccttcgggaagcgtggcgctttctcatagctcacgctgtaggtatctcagttcggtgtaggtcgttcgctccaagctgggctgtgtgcacgaaccccccgttcagcccgaccgctgcgccttatccggtaactatcgtcttgagtccaacccggtaagacacgacttatcgccactggcagcagccactggtaacaggattagcagagcgaggtatgtaggcggtgctacagagttcttgaagtggtggcctaactacggctacactagaaggacagtatttggtatctgcgctctgctgaagccagttaccttcggaaaaagagttggtagctcttgatccggcaaacaaaccaccgctggtagcggtggtttttttgtttgcaagcagcagattacgcgcagaaaaaaaggatctcaagaagatcctttgatcttttctactgcagaagcttgttagacaccctgtcatgtattttatattatttatttcaccatacggattaagtgaaacctaatgaaaatagtactttcggagctttaactttaatgaaggtatgtttttttatagacatcgatgtctggtttaacaataggaaaaagtagctaaaactcccatgaattaaagaaataacaaggtgtctaacaacctgttattaagaatgttagaaaagacttaacatttgtgttgagtttttatagacattggtgtctagacatacggtagataaggtttgctcaaaaataaaataaaaaaagattggactaaaaaacatttaatttagtacaatttaattagttattttttcgtctcaaattttgctttgttgagcagaaatttagataaaaaaatccccgtgatcagattacaatgtcgttcattgtacgatgtgtcgaaaaatctttacgacactctaaactgaccacacgggggaaaaagaaaactgaactaataacatcatgatactcggaaaacctagcaattctcaacccctaaacaaaagaaacttccaaaaccctgaccatataaaggagtggcaacaatcagcaatcagtcaagatttgatagcagaaaatcttgtatcggttgctaatggttttgatgtactatttatcggcaataaataccgaactaacacgggtgttctgtcacggcacatattaaactcctattctcatttagaagatggtggttcgtatggtagaacatttgacccatttaccaataaagaaatgcagtgggttcaatttaaaccgaatagaccaagaaaaggttctactggtaaggtaatcaaatatgaatcgccaaaaggtgaacctacaagagttctaatgccgtttgtgcctatgaaaatatggcaacggattagcgataagttcggagtaccgattaatccgaaaaaagatactcacttttgggaatgggtaaagaataatccatcgataccgattgccattacagaaggaaataaaaaagctaattgcctattatcctatggctatcctgctattgcctttgtaggcatttggaacggattagagaaaataaatgatttctcgaaggaaaagcagttaaaagaggatttgaaatggttgttatccaacggcaaccgaaatattaatatcatctttgaccaagaccagaaacaaaaaactgtaattaatgtaaacaaagctattttcgctttatcttctctaataagtagaaatggtcataaagttaatattgtgcaatggttgccgtcaaaaggtaaaggaatagatgattatttggtagctttaccttttgagaaaagagaaaatcatttagacaacttaattaaaattgcaccatcatttaatttttggtcaactaaatacttattcaagtgtcgtaaaccagatttaaccgtaaattgccgttatttgagcgatgcagtaaaagaattacctcaagaggatatagcattaatagcacctcacggcacgggtaaaacttcattagtagctactcacgttaagaatcggagttatcacggaaggaaaactatttcattggtgcatcttgaaagtttagccaaagctaatggcaacgcacttggattatattaccgaaccgaaaataatattgaaaagcaatatcttggatttagcttatgtgtagatagttgccgtgataagattaacggcattacaactgatattatttcaggtcaagattattgccttttcattgatgaaattgaccaagtaattccacacatccttaacagtgaaactgaagtaagtaagtatagatgcaccatcattgacactttttctgaactggtgagaaatgctgaacaggtcattattgctgatgctgatttatccgatgtgacgattgacctaatagaaaacatcagaggtaaaaaactatatgtaatcaagaatgaatatcagtatcagggaatgacttttaacgccgttggttcaccattagaaatgatggcaatgatgggaaaatcggtgtcagaaggcaagaaattatttattaacaccacatcccaaaaggcaaaaagtaagtacggcacaatcgctcttgagtcttatatttttggtctaaataaagaagcaaagatattaagaatagactctgaaaccactaaaaaccctgaacatccagcctataaaatcattgaccaagacttaaataatatcctcaaagattatgattatgtcattgcctcaccttgccttcaaacaggtgtcagtattaccttaaaagggcattttgaccagcaatttaacttttccagtggaaacattacacctcattgctttttacagcaaatgtggcggttgagggatgcagaaattgaaagattctattatgtgccgaactcatctaacctcaatctcattgggaataagtcaagttcaccatcagaccttctaaagagcaataacaagatggcaacggcaacggttaaccttttgggtagaatcgactccgaatattccctagagtatgaatcgcacggcatttggcttgagacgtgggcaaaattatcagcacggcataacagttcaatgcgttgttactctgaaattcttacctatctaattacgtctcaagggcataaattaaatatcaacattccctcacctcttgcagatattaagaagctaaatgatgaggtaagtagtaacagggaaaaggtaaaaaatgagagatactctcagaggttaaactcaccagatattaacgatgcagaagctaccatactcgaatctaaagagcaaaaaatcggattgactctcaatgagagatgcaccctagaaaagcataaagttaagaagcggtatgggaatgtaaagatggatattctcacctttgatgatgatggactataccccaaactcagactattttattacctcaccatcggtaaacctcatctcaaggctaatgacagaaaagctattgccaaaatgggcaatgacaataaaggcaagattctatcaaaagacttagttaataaaacttactccgctcgtgtgaaggtcttagagattcttaaactaactgactttatcgacaatcttagagatgaactcttaataactcccaataatccagctatcaccgattttaataatcttctgctaagagctaagaaggatttaagagtattaggagtcaacatcggaaaatatccaatggccaacattaatgccgtacttactctcattggtcacaaactttctgtaatgagagatgagttcggaaaagagaaaaggataaaagtagatggtaaatcataccgatgttatcaacttgaaacattaccagattttaccaatgatactcttgactactggttagaaaatgatagccaaaaagaagtaacagcaacagaaaattactccgaaaattttaacccttcaaatagctacaatccagacagtaagacactttcagagggtgcaaatttcctatatataaataaagaagaattgcatccaaataaattgcacctagaaataaaagaaggtgctgaactttttttattcggggtaaaggtgattgtgaaaggaatcttggacggggcagtaactatattctctatgggtcaagaatacgatttatccctcaatgaactagaggggatgttaacatcatgaactttacaagaatctttttaaagggcgatcgcaccatgttaaatgatggtacatttgttcagatatttgatatttaccatgaccacgcattgggagtgacccttgaccttaagacagaaaaaattatttccgatgatgttagggtaattactgtcaaagacttattgttcgatggcacttataaaggggtaaaatcttttatgcccgataatgcccgataatgcccgattgatgctacaaaatcccataatcataagcgataatcccctaatagcttgtaattcttgaaccgtagcgattttagagtattccaaaaagaagaaataaacaccgcaaaatgtcgtatttcacatatataaaccaaggttttttgccctaaaatctttatgtttgtagtgtgatgttgggtcaaaatggtcagaaaagttgcaaggtttttatggatgcttacgcgcgcgaggggtaagcatccccaaatagttactttatcctagtccatgcccatttattgccgtcccgttcggctttaaaaaagtgccaaaactcacaaggtgcaataaaaagttctgtacctttcgcaaccctagataatctttcaacagttactttttttcctattatctcggtacaaagtttggctagtttctcttttccctctttttcaatcaagccttcttgtatgcccaactcattgattaatctctctatttttaccattatttcccgttcaggtagtttatcccctaaatcttcatcggggggcaatgtagggcattctgaaggggctttttcttctgtctggacattatctaatattgaagtaaccaaactatcttcagttttttctattcctattaattcatattcggttactgtatccgtatcaatatccgaataactatctttatccgtattagctattcggttaagtttatccgttaactcagaaacaagactatatagcggttttagcttttcttctatcctgttatctaatacggataagtttatacggttatcattatccgtattagtatcattgggcttttttggtagttctaccccctcataaaccgcttttattcccaattccaacagactgataacagtatcctttataatgggttttttgctgatatggtgaacttttgccccttccatcattgcgatactttctatctcactcatcaacttatcgcttaagtgaatctcgtatctgtttaatcccttactggttttattcatatccgtttactttattcggttaacaattctattttatacgaataaaatattatacggttaactttatacgtttaactattttatctatacggataacagtaataagttattcgtattagttatacgtttacttttatccaaataaaattagtgcatttaaactaaaagaatgattttatcggagttgatagcattggattaacctaaagatgtttataagctatatctgataagtatttaaggttattttgttattctgtttattgacattatcagaataaaagaatagaatataattgttgagagataagaggtttaagtgattatggttaagaagttagttggttatgtcagggtcagtagtgaatcgcaagaggataacactagcttacagaatcagatagagagaattgaagcatattgtatggcttttggttatgagttggtaaaaatattcaaagaggttgccactggtacaaaagcagatattgaaacccgtcctatttttaatgaagctatagaatacttgaaacaggataatgctaatggaattattgccttgaagctagaccgaatcgcacggaatgctttagatgtattgcgtttggttcgtgaaaccttagaaccacaaaataaaatgttagtgttactagatattcaggtagatacttcgacaccttcaggaaaaatgattttaactgtaatgagtgccgttgctgaactcgaaagagacatgatctatgatcgcactcaggggggtagaaagactaaagcccaaaagggcgggtatgcctacgggaaacctaaatttggctataagactgaagaaaaggaactaaaagaagattcagcacaacaggaaactattaaactaattaagagacaccgtaggtcagggaaaagctaccagaaaatagctgattatctcaatgcccaaagtattcccactaaacaaggtaagaaatggagttctagcgtcgtctatcgaatctgtcaggaaaaagctggttaagtctgtttatagatatttagaatttattgaataaaaatagtatgaacaataaatatttatggactaaccacgctcggaaacgtttaactgaacgatgggaaataaaagaatcatgggttattgataccatcgaaaatcctgaacgttcagaatttattgttgatgagtcaggggaaaaatatcattactataaaagaatagctaagtttaagaatagagtgttagaagtgataacttctgccaactcaacacccacaagaataataaccttttactttaaccgtaacatgaggaaaaatttatgattgttacttacgataatgaagttgacgcaatttattttaagttaacggaaaataaaattgatagcaccgaacctcaaacagacaggattatcattgattacgatgaaagtaataatattgttggcattgaggtattagattttaattatcttgtcaagaaaggtttaaccgttgctgatttacctttttctgaagatgaaagattaacagcttctcaatattttaattttcctgttgctatctaatccagaaggggcaataatccccttctttcatcgagttagacttaatatcacaaaagtcattttcattttaccgtttcttttccacagcgtccgtacgcccctcgttaaatctcaaaaccgacaatttatgatgtttataaaaagttactcactttaataagtatttatactcattaaagggttattctttttttgtagcctgataggttgggaaggaatatttcagattatcagatttgttg

SEQ ID NO: 45 - DNA, 13081 bp, Cyanobacterium sp. ABICyano1
aatatttttcgtcagatacgcaaaccttacaaacataattaacaactgaaactattgatatgtctaggttttagctctatcacaggttggatctgtcgacgagaaggggaacagggaaaagtatttataattgatacaaactgtggttcaacttattttaaagacatttttctccatttaatgattatttcggggaaaattttgaggatttttgattcttaaattgacgatattttgtcactaacacaacgtgagcggtaaatttatatatagacctaaaacctttactataagtgttatatatttaaatcgctaagtatatagttaaagtgtagccaataattaacttttaacaagtgattaccgttaagtcccttaatttatcactacaagctaaaacaaatttttcaattagatatgacattaggtcaaagttcatagtatgatagtaaaaaataaaatttgacgatctgtaaaaataaaaaaacacaatgaattcttataccgtgggtacttatttagccgaacgcttagtgcaaattggtttaaaacatcattttgccgtggctggggactataatttagtgttattggataacttattattaaataaaaacatggaacaagtgtattgttgtaatgaattaaattgtggtttttctgctgaaggttatgctagagctaaaggtgcagctgctgctgttgttacttattctgtgggtgctttatctgcttttgatgctattggtggtgcttatgccgaaaatttacccgtgattttaatttctggtgcccctaataataatgatcatgccgctggacatgttttacatcatgccttaggtaaaaccgattatcattatcaattagaaatggccaaaaatattactgctgctgccgaagctatttatactcctgaagaagcccctgccaaaattgatcatgtgattaaaaccgccttacgcgaaaaaaaacccgtgtatttagaaattgcctgtaatattgcttctatgccttgtgctgctcctgggcctgcttctgctttatttaatgatgaagcctctgatgaagctagtttaaatgctgccgtggaagaaaccttaaaatttattgccaatcgcgataaagttgccgtgttagttggttctaaattaagagctgctggtgctgaagaagctgctgttaaatttgctgatgctttaggtggtgcagttgctactatggctgctgccaaatctttttttcccgaagaaaatccccattatattggaactagttggggagaagtttcttatcctggtgtggaaaaaactatgaaagaagccgacgctgttattgctttagcccctgtgtttaatgattattctaccactggttggactgatattcccgatcccaaaaaattagttttagccgaacctcgttctgttgttgttaatggtgttcgctttccctctgtgcatttaaaagattatttaacccgcttagcccaaaaagtttctaaaaaaactggtgccttagatttttttaaatctttaaatgcgggtgaattaaaaaaagctgctcctgctgatccttctgctcctttagttaatgctgaaattgcccgtcaagttgaagccttattaacccctaatactaccgttattgccgaaactggtgattcttggtttaatgcccaacgcatgaaattacctaatggtgcccgtgttgaatatgaaatgcaatggggtcatattggttggtctgtacctgctgcttttggttatgctgttggtgctcctgaacgtcgtaatattttaatggtgggtgatggttcttttcaattaactgcccaagaagttgcccaaatggttcgcttaaaattacccgttattatttttttaataaataattatggttataccattgaagtgatgattcatgatgggccatataataatattaaaaattgggattatgcgggtttaatggaagtgtttaatggtaatggtggttatgattctggtgctggtaaaggtttaaaagccaaaactggtggtgaattagctgaagctattaaagttgccttagccaatactgatgggccaaccttaattgaatgttttattggtcgcgaagattgtaccgaagaattagttaaatggggtaaacgtgttgctgctgctaattctcgcaaacccgtgaataaattattgtaatttttggggatcaattcgagctcggtacccaaactagtatgtagggtgaggttatagctagcgcttttaattaatccgcggatttgtattcaatatattaaccgaggacaacatatgattaaagcctatgctgccttagaagccaatggtaaattacaaccctttgaatatgatcctggtgctttaggtgccaatgaagtggaaattgaagtgcaatattgtggtgtgtgtcattctgatttatctatgattaataatgaatggggtatttctaattatcccttagttcctggtcatgaagttgttggtactgttgctgctatgggtgaaggtgttaatcatgtggaagtgggtgatttagttggtttaggttggcattctggttattgtatgacctgtcattcttgtttatctggttatcataatttatgtgccactgccgaatctactattgtgggtcattatggtggttttggtgatagagttcgtgctaaaggtgtttctgtggtgaaattacccaaaggtattgatttagcctctgctgggcctttattttgtggtggtattaccgttttttctcccatggtggaattatctttaaaacctaccgccaaagttgctgttattggtattggtggtttaggtcatttagccgttcaatttttaagagcctggggttgtgaagttactgcttttacctcttctgcccgtaaacaaaccgaagttttagaattaggtgcccatcatattttagattctaccaatcctgaagctattgcttctgccgaaggtaaatttgattatattatttctaccgtgaatttaaaattagattggaatttatatatcagtaccttagcccctcaaggtcattttcattttgttggtgtggtgttagaacccttggacttaaacttatttcccttattaatgggacaacgttctgtttctgcttctcctgttggttctcctgctactattgccactatgttagattttgccgtgcgtcatgatattaaacccgtggtggaacaattttcttttgatcaaattaatgaagccattgcccatttagaatctggtaaagcccattatcgcgtggtgttatctcattctaaaaattaataagattaacttctaaactgaaacaaatttgagggtaggcttcattgtctgcccttatttttttatttaggaaaagtgaacagactaaagagtgttggctctattgctttgagtatgtaaattaggcgttgctgaattaaggtatgatttttgaccccttctctcttctgcagttacctaggatttctggcgaaagggggatgtgctgcaaggcgattaagttgggtaacgccagggttttcccagtcacgacgttgtaaaacgacggccagtgagcgcgacgtaatacgactcactatagggcgaattggcggaaggccgtcaaggccgcatggcgcgcctacgtagacaattgtcgatgtaattattaactatcttattatagatgaggggagagggagaaattagttcggagagaacgctcgagcgctcgttccgcaaagcggtacggagttagttaggggctaatgggcattctcccgtacaggaaagagttagaagttattaattatcaacaattctcctttgcctagtgcatcgttacctttttaattaaaacataaggaaaactaataatcgtaataatttaacctcaaagtgtaaagaaatgtgaaattctgacttttataacgttaaagagggaaaaattagcagtttaaaatacctagagaatagtctggggtaagcatagagaattagattagttaagttaatcaaattcagaaaaaataataatcgtaaatagttaatctgggtgtatagaaaatgatccccttcatgataagatttaaactcgaaaagcaaaagccaaaaaactaacttccattaaaagaagttgttacatataacgctataaagaaaatttatatatttggaggataccaaccatgtctcatattcaacgtgaaactagttgttctcgtcctcgtttaaattctaatatggatgccgatttatatggttataaatgggctcgtgataatgttggtcaatctggtgctactatttatcgtttatatggtaaacctgatgctcctgaattattcttgaaacatggtaaaggttctgttgctaatgatgttactgatgaaatggttcgtttaaactggttgactgaatttatgcctttacctactattaaacattttattcgtactcccgatgatgcttggttattaactactgctattcctggtaaaactgcttttcaagttttagaagaatatcctgattctggtgaaaatattgttgatgctttagctgtttttttacgtcgtttacattctattcccgtttgtaattgtccttttaattctgatcgtgtttttcgtttagctcaagctcaatctcgtatgaataatggtttagttgatgcttctgattttgatgatgaacgtaatggttggcctgttgaacaagtttggaaagaaatgcacaaattgttacctttttctcctgattctgttgttactcatggtgatttttctttagataatttgatctttgatgaaggtaaattgattggttgtattgatgttggtcgtgttggtattgctgatcgttatcaagatttagctattttatggaattgtttaggtgaattttctccttctttacagaaacgtttatttcagaaatatggtattgataatcctgatatgaacaagttacaatttcatttaatgttggacgagttcttttaagaattaattcatgaccaaaatcccttaacgtgagttttcgttccactgagcgtcagaccccgtagaaaagatcaaaggatcttcttgagatcctttttttctgcgcgtaatctgctgctatttaaattacgtacacgtgttattactttgttaacgacaattgtcttaattaactgggcctcatgggccttccgctcactgcccgctttccagtcgggaaacctgtcgtgccagctctgcagatgacggtgaaaacctctgacacatgcagctcccggagacggtcacagcttgtctgtaagcggatgccgggagcagacaagcccgtcagggcgcgtcagcgggtgttggcgggtgtcggggcgcagccatgacccagtcacgtagcgatagcggagtgtatactggcttaactatgcggcatcagagcagattgtactgagagtgcaccatatgcggtgtgaaataccgcacagatgcgtaaggagaaaataccgcatcaggcgctcttccgcttcctcgctcactgactcgctgcgctcggtcgttcggctgcggcgagcggtatcagctcactcaaaggcggtaatacggttatccacagaatcaggggataacgcaggaaagaacatgtgagcaaaaggccagcaaaaggccaggaaccgtaaaaaggccgcgttgctggcgtttttccataggctccgcccccctgacgagcatcacaaaaatcgacgctcaagtcagaggtggcgaaacccgacaggactataaagataccaggcgtttccccctggaagctccctcgtgcgctctcctgttccgaccctgccgcttaccggatacctgtccgcctttctcccttcgggaagcgtggcgctttctcatagctcacgctgtaggtatctcagttcggtgtaggtcgttcgctccaagctgggctgtgtgcacgaaccccccgttcagcccgaccgctgcgccttatccggtaactatcgtcttgagtccaacccggtaagacacgacttatcgccactggcagcagccactggtaacaggattagcagagcgaggtatgtaggcggtgctacagagttcttgaagtggtggcctaactacggctacactagaaggacagtatttggtatctgcgctctgctgaagccagttaccttcggaaaaagagttggtagctcttgatccggcaaacaaaccaccgctggtagcggtggtttttttgtttgcaagcagcagattacgcgcagaaaaaaaggatctcaagaagatcctttgatcttttctactgcagaagcttgttagacaccctgtcatgtattttatattatttatttcaccatacggattaagtgaaacctaatgaaaatagtactttcggagctttaactttaatgaaggtatgtttttttatagacatcgatgtctggtttaacaataggaaaaagtagctaaaactcccatgaattaaagaaataacaaggtgtctaacaacctgttattaagaatgttagaaaagacttaacatttgtgttgagtttttatagacattggtgtctagacatacggtagataaggtttgctcaaaaataaaataaaaaaagattggactaaaaaacatttaatttagtacaatttaattagttattttttcgtctcaaattttgctttgttgagcagaaatttagataaaaaaatccccgtgatcagattacaatgtcgttcattgtacgatgtgtcgaaaaatctttacgacactctaaactgaccacacgggggaaaaagaaaactgaactaataacatcatgatactcggaaaacctagcaattctcaacccctaaacaaaagaaacttccaaaaccctgaccatataaaggagtggcaacaatcagcaatcagtcaagatttgatagcagaaaatcttgtatcggttgctaatggttttgatgtactatttatcggcaataaataccgaactaacacgggtgttctgtcacggcacatattaaactcctattctcatttagaagatggtggttcgtatggtagaacatttgacccatttaccaataaagaaatgcagtgggttcaatttaaaccgaatagaccaagaaaaggttctactggtaaggtaatcaaatatgaatcgccaaaaggtgaacctacaagagttctaatgccgtttgtgcctatgaaaatatggcaacggattagcgataagttcggagtaccgattaatccgaaaaaagatactcacttttgggaatgggtaaagaataatccatcgataccgattgccattacagaaggaaataaaaaagctaattgcctattatcctatggctatcctgctattgcctttgtaggcatttggaacggattagagaaaataaatgatttctcgaaggaaaagcagttaaaagaggatttgaaatggttgttatccaacggcaaccgaaatattaatatcatctttgaccaagaccagaaacaaaaaactgtaattaatgtaaacaaagctattttcgctttatcttctctaataagtagaaatggtcataaagttaatattgtgcaatggttgccgtcaaaaggtaaaggaatagatgattatttggtagctttaccttttgagaaaagagaaaatcatttagacaacttaattaaaattgcaccatcatttaatttttggtcaactaaatacttattcaagtgtcgtaaaccagatttaaccgtaaattgccgttatttgagcgatgcagtaaaagaattacctcaagaggatatagcattaatagcacctcacggcacgggtaaaacttcattagtagctactcacgttaagaatcggagttatcacggaaggaaaactatttcattggtgcatcttgaaagtttagccaaagctaatggcaacgcacttggattatattaccgaaccgaaaataatattgaaaagcaatatcttggatttagcttatgtgtagatagttgccgtgataagattaacggcattacaactgatattatttcaggtcaagattattgccttttcattgatgaaattgaccaagtaattccacacatccttaacagtgaaactgaagtaagtaagtatagatgcaccatcattgacactttttctgaactggtgagaaatgctgaacaggtcattattgctgatgctgatttatccgatgtgacgattgacctaatagaaaacatcagaggtaaaaaactatatgtaatcaagaatgaatatcagtatcagggaatgacttttaacgccgttggttcaccattagaaatgatggcaatgatgggaaaatcggtgtcagaaggcaagaaattatttattaacaccacatcccaaaaggcaaaaagtaagtacggcacaatcgctcttgagtcttatatttttggtctaaataaagaagcaaagatattaagaatagactctgaaaccactaaaaaccctgaacatccagcctataaaatcattgaccaagacttaaataatatcctcaaagattatgattatgtcattgcctcaccttgccttcaaacaggtgtcagtattaccttaaaagggcattttgaccagcaatttaacttttccagtggaaacattacacctcattgctttttacagcaaatgtggcggttgagggatgcagaaattgaaagattctattatgtgccgaactcatctaacctcaatctcattgggaataagtcaagttcaccatcagaccttctaaagagcaataacaagatggcaacggcaacggttaaccttttgggtagaatcgactccgaatattccctagagtatgaatcgcacggcatttggcttgagacgtgggcaaaattatcagcacggcataacagttcaatgcgttgttactctgaaattcttacctatctaattacgtctcaagggcataaattaaatatcaacattccctcacctcttgcagatattaagaagctaaatgatgaggtaagtagtaacagggaaaaggtaaaaaatgagagatactctcagaggttaaactcaccagatattaacgatgcagaagctaccatactcgaatctaaagagcaaaaaatcggattgactctcaatgagagatgcaccctagaaaagcataaagttaagaagcggtatgggaatgtaaagatggatattctcacctttgatgatgatggactataccccaaactcagactattttattacctcaccatcggtaaacctcatctcaaggctaatgacagaaaagctattgccaaaatgggcaatgacaataaaggcaagattctatcaaaagacttagttaataaaacttactccgctcgtgtgaaggtcttagagattcttaaactaactgactttatcgacaatcttagagatgaactcttaataactcccaataatccagctatcaccgattttaataatcttctgctaagagctaagaaggatttaagagtattaggagtcaacatcggaaaatatccaatggccaacattaatgccgtacttactctcattggtcacaaactttctgtaatgagagatgagttcggaaaagagaaaaggataaaagtagatggtaaatcataccgatgttatcaacttgaaacattaccagattttaccaatgatactcttgactactggttagaaaatgatagccaaaaagaagtaacagcaacagaaaattactccgaaaattttaacccttcaaatagctacaatccagacagtaagacactttcagagggtgcaaatttcctatatataaataaagaagaattgcatccaaataaattgcacctagaaataaaagaaggtgctgaactttttttattcggggtaaaggtgattgtgaaaggaatcttggacggggcagtaactatattctctatgggtcaagaatacgatttatccctcaatgaactagaggggatgttaacatcatgaactttacaagaatctttttaaagggcgatcgcaccatgttaaatgatggtacatttgttcagatatttgatatttaccatgaccacgcattgggagtgacccttgaccttaagacagaaaaaattatttccgatgatgttagggtaattactgtcaaagacttattgttcgatggcacttataaaggggtaaaatcttttatgcccgataatgcccgataatgcccgattgatgctacaaaatcccataatcataagcgataatcccctaatagcttgtaattcttgaaccgtagcgattttagagtattccaaaaagaagaaataaacaccgcaaaatgtcgtatttcacatatataaaccaaggttttttgccctaaaatctttatgtttgtagtgtgatgttgggtcaaaatggtcagaaaagttgcaaggtttttatggatgcttacgcgcgcgaggggtaagcatccccaaatagttactttatcctagtccatgcccatttattgccgtcccgttcggctttaaaaaagtgccaaaactcacaaggtgcaataaaaagttctgtacctttcgcaaccctagataatctttcaacagttactttttttcctattatctcggtacaaagtttggctagtttctcttttccctctttttcaatcaagccttcttgtatgcccaactcattgattaatctctctatttttaccattatttcccgttcaggtagtttatcccctaaatcttcatcggggggcaatgtagggcattctgaaggggctttttcttctgtctggacattatctaatattgaagtaaccaaactatcttcagttttttctattcctattaattcatattcggttactgtatccgtatcaatatccgaataactatctttatccgtattagctattcggttaagtttatccgttaactcagaaacaagactatatagcggttttagcttttcttctatcctgttatctaatacggataagtttatacggttatcattatccgtattagtatcattgggcttttttggtagttctaccccctcataaaccgcttttattcccaattccaacagactgataacagtatcctttataatgggttttttgctgatatggtgaacttttgccccttccatcattgcgatactttctatctcactcatcaacttatcgcttaagtgaatctcgtatctgtttaatcccttactggttttattcatatccgtttactttattcggttaacaattctattttatacgaataaaatattatacggttaactttatacgtttaactattttatctatacggataacagtaataagttattcgtattagttatacgtttacttttatccaaataaaattagtgcatttaaactaaaagaatgattttatcggagttgatagcattggattaacctaaagatgtttataagctatatctgataagtatttaaggttattttgttattctgtttattgacattatcagaataaaagaatagaatataattgttgagagataagaggtttaagtgattatggttaagaagttagttggttatgtcagggtcagtagtgaatcgcaagaggataacactagcttacagaatcagatagagagaattgaagcatattgtatggcttttggttatgagttggtaaaaatattcaaagaggttgccactggtacaaaagcagatattgaaacccgtcctatttttaatgaagctatagaatacttgaaacaggataatgctaatggaattattgccttgaagctagaccgaatcgcacggaatgctttagatgtattgcgtttggttcgtgaaaccttagaaccacaaaataaaatgttagtgttactagatattcaggtagatacttcgacaccttcaggaaaaatgattttaactgtaatgagtgccgttgctgaactcgaaagagacatgatctatgatcgcactcaggggggtagaaagactaaagcccaaaagggcgggtatgcctacgggaaacctaaatttggctataagactgaagaaaaggaactaaaagaagattcagcacaacaggaaactattaaactaattaagagacaccgtaggtcagggaaaagctaccagaaaatagctgattatctcaatgcccaaagtattcccactaaacaaggtaagaaatggagttctagcgtcgtctatcgaatctgtcaggaaaaagctggttaagtctgtttatagatatttagaatttattgaataaaaatagtatgaacaataaatatttatggactaaccacgctcggaaacgtttaactgaacgatgggaaataaaagaatcatgggttattgataccatcgaaaatcctgaacgttcagaatttattgttgatgagtcaggggaaaaatatcattactataaaagaatagctaagtttaagaatagagtgttagaagtgataacttctgccaactcaacacccacaagaataataaccttttactttaaccgtaacatgaggaaaaatttatgattgttacttacgataatgaagttgacgcaatttattttaagttaacggaaaataaaattgatagcaccgaacctcaaacagacaggattatcattgattacgatgaaagtaataatattgttggcattgaggtattagattttaattatcttgtcaagaaaggtttaaccgttgctgatttacctttttctgaagatgaaagattaacagcttctcaatattttaattttcctgttgctatctaatccagaaggggcaataatccccttctttcatcgagttagacttaatatcacaaaagtcattttcattttaccgtttcttttccacagcgtccgtacgcccctcgttaaatctcaaaaccgacaatttatgatgtttataaaaagttactcactttaataagtatttatactcattaaagggttattctttttttgtagcctgataggttgggaaggaatatttcagattatcagatttgttg

SEQ ID NO: 46 - DNA, 13562 bp, Cyanobacterium sp. ABICyano1
aatatttttcgtcagatacgcaaaccttacaaacataattaacaactgaaactattgatatgtctaggttttagctctatcacaggttggatctgtcgacgagaaggggaacagggaaaagtatttataattgatacaaactgtggttcaacttattttaaagacatttttctccatttaatgattatttcggggaaaattttgaggatttttgattcttaaattgacgatattttgtcactaacacaacgtgagcggtaaatttatatatagacctaaaacctttactataagtgttatatatttaaatcgctaagtatatagttaaagtgtagccaataattaacttttaacaagtgattaccgttaagtcccttaatttatcactacaagctaaaacaaatttttcaattagatatgacattaggtcaaagttcatagtatgatagtaaaaaataaaatttgacgatctgtaaaaataaaaaaacacaatgaattcttataccgtgggtacttatttagccgaacgcttagtgcaaattggtttaaaacatcattttgccgtggctggggactataatttagtgttattggataacttattattaaataaaaacatggaacaagtgtattgttgtaatgaattaaattgtggtttttctgctgaaggttatgctagagctaaaggtgcagctgctgctgttgttacttattctgtgggtgctttatctgcttttgatgctattggtggtgcttatgccgaaaatttacccgtgattttaatttctggtgcccctaataataatgatcatgccgctggacatgttttacatcatgccttaggtaaaaccgattatcattatcaattagaaatggccaaaaatattactgctgctgccgaagctatttatactcctgaagaagcccctgccaaaattgatcatgtgattaaaaccgccttacgcgaaaaaaaacccgtgtatttagaaattgcctgtaatattgcttctatgccttgtgctgctcctgggcctgcttctgctttatttaatgatgaagcctctgatgaagctagtttaaatgctgccgtggaagaaaccttaaaatttattgccaatcgcgataaagttgccgtgttagttggttctaaattaagagctgctggtgctgaagaagctgctgttaaatttgctgatgctttaggtggtgcagttgctactatggctgctgccaaatctttttttcccgaagaaaatccccattatattggaactagttggggagaagtttcttatcctggtgtggaaaaaactatgaaagaagccgacgctgttattgctttagcccctgtgtttaatgattattctaccactggttggactgatattcccgatcccaaaaaattagttttagccgaacctcgttctgttgttgttaatggtgttcgctttccctctgtgcatttaaaagattatttaacccgcttagcccaaaaagtttctaaaaaaactggtgccttagatttttttaaatctttaaatgcgggtgaattaaaaaaagctgctcctgctgatccttctgctcctttagttaatgctgaaattgcccgtcaagttgaagccttattaacccctaatactaccgttattgccgaaactggtgattcttggtttaatgcccaacgcatgaaattacctaatggtgcccgtgttgaatatgaaatgcaatggggtcatattggttggtctgtacctgctgcttttggttatgctgttggtgctcctgaacgtcgtaatattttaatggtgggtgatggttcttttcaattaactgcccaagaagttgcccaaatggttcgcttaaaattacccgttattatttttttaataaataattatggttataccattgaagtgatgattcatgatgggccatataataatattaaaaattgggattatgcgggtttaatggaagtgtttaatggtaatggtggttatgattctggtgctggtaaaggtttaaaagccaaaactggtggtgaattagctgaagctattaaagttgccttagccaatactgatgggccaaccttaattgaatgttttattggtcgcgaagattgtaccgaagaattagttaaatggggtaaacgtgttgctgctgctaattctcgcaaacccgtgaataaattattgtaatttttggggatcaattcgagctcctccgcttaaaaaatttcatttttcgatcaaaaaagacaaattattactaattagctcatggcaataaataatcagtagtaatctgttttcacattttattgttaatttttattattgctaatatcaaccttttctacttctgcttaatattttatttatgctcaatgggaaaatctgaaataagattgagaacagtgttaccaatagaagtatttaaggtttaaagcataccttaaagataacatttttttttgaaaagagtcaaattatttttgaaaggctgatatttttgatatttactaatattttatttatttctttttcccttaaaataagagctaaatctgtttttattatcatttatcaagctctattaatacctcaactttttcaagaaaaaataataataatttttccctctattctcatgaccttttaggaaaattaattttagaaaaactattgacaaacccataaaaaatgagataagattatagattgtcactggtattttatactagaggcaaattatatttatatatacaaaaatgctgtataaaaaacatctcatatgattaaagcctatgctgccttagaagccaatggtaaattacaaccctttgaatatgatcctggtgctttaggtgccaatgaagtggaaattgaagtgcaatattgtggtgtgtgtcattctgatttatctatgattaataatgaatggggtatttctaattatcccttagttcctggtcatgaagttgttggtactgttgctgctatgggtgaaggtgttaatcatgtggaagtgggtgatttagttggtttaggttggcattctggttattgtatgacctgtcattcttgtttatctggttatcataatttatgtgccactgccgaatctactattgtgggtcattatggtggttttggtgatagagttcgtgctaaaggtgtttctgtggtgaaattacccaaaggtattgatttagcctctgctgggcctttattttgtggtggtattaccgttttttctcccatggtggaattatctttaaaacctaccgccaaagttgctgttattggtattggtggtttaggtcatttagccgttcaatttttaagagcctggggttgtgaagttactgcttttacctcttctgcccgtaaacaaaccgaagttttagaattaggtgcccatcatattttagattctaccaatcctgaagctattgcttctgccgaaggtaaatttgattatattatttctaccgtgaatttaaaattagattggaatttatatatcagtaccttagcccctcaaggtcattttcattttgttggtgtggtgttagaacccttggacttaaacttatttcccttattaatgggacaacgttctgtttctgcttctcctgttggttctcctgctactattgccactatgttagattttgccgtgcgtcatgatattaaacccgtggtggaacaattttcttttgatcaaattaatgaagccattgcccatttagaatctggtaaagcccattatcgcgtggtgttatctcattctaaaaattaataagattaacttctaaactgaaacaaatttgagggtaggcttcattgtctgcccttatttttttatttaggaaaagtgaacagactaaagagtgttggctctattgctttgagtatgtaaattaggcgttgctgaattaaggtatgatttttgaccccttctctcttctgcagttacctaggatttctggcgaaagggggatgtgctgcaaggcgattaagttgggtaacgccagggttttcccagtcacgacgttgtaaaacgacggccagtgagcgcgacgtaatacgactcactatagggcgaattggcggaaggccgtcaaggccgcatggcgcgcctacgtagacaattgtcgatgtaattattaactatcttattatagatgaggggagagggagaaattagttcggagagaacgctcgagcgctcgttccgcaaagcggtacggagttagttaggggctaatgggcattctcccgtacaggaaagagttagaagttattaattatcaacaattctcctttgcctagtgcatcgttacctttttaattaaaacataaggaaaactaataatcgtaataatttaacctcaaagtgtaaagaaatgtgaaattctgacttttataacgttaaagagggaaaaattagcagtttaaaatacctagagaatagtctggggtaagcatagagaattagattagttaagttaatcaaattcagaaaaaataataatcgtaaatagttaatctgggtgtatagaaaatgatccccttcatgataagatttaaactcgaaaagcaaaagccaaaaaactaacttccattaaaagaagttgttacatataacgctataaagaaaatttatatatttggaggataccaaccatgtctcatattcaacgtgaaactagttgttctcgtcctcgtttaaattctaatatggatgccgatttatatggttataaatgggctcgtgataatgttggtcaatctggtgctactatttatcgtttatatggtaaacctgatgctcctgaattattcttgaaacatggtaaaggttctgttgctaatgatgttactgatgaaatggttcgtttaaactggttgactgaatttatgcctttacctactattaaacattttattcgtactcccgatgatgcttggttattaactactgctattcctggtaaaactgcttttcaagttttagaagaatatcctgattctggtgaaaatattgttgatgctttagctgtttttttacgtcgtttacattctattcccgtttgtaattgtccttttaattctgatcgtgtttttcgtttagctcaagctcaatctcgtatgaataatggtttagttgatgcttctgattttgatgatgaacgtaatggttggcctgttgaacaagtttggaaagaaatgcacaaattgttacctttttctcctgattctgttgttactcatggtgatttttctttagataatttgatctttgatgaaggtaaattgattggttgtattgatgttggtcgtgttggtattgctgatcgttatcaagatttagctattttatggaattgtttaggtgaattttctccttctttacagaaacgtttatttcagaaatatggtattgataatcctgatatgaacaagttacaatttcatttaatgttggacgagttcttttaagaattaattcatgaccaaaatcccttaacgtgagttttcgttccactgagcgtcagaccccgtagaaaagatcaaaggatcttcttgagatcctttttttctgcgcgtaatctgctgctatttaaattacgtacacgtgttattactttgttaacgacaattgtcttaattaactgggcctcatgggccttccgctcactgcccgctttccagtcgggaaacctgtcgtgccagctctgcagatgacggtgaaaacctctgacacatgcagctcccggagacggtcacagcttgtctgtaagcggatgccgggagcagacaagcccgtcagggcgcgtcagcgggtgttggcgggtgtcggggcgcagccatgacccagtcacgtagcgatagcggagtgtatactggcttaactatgcggcatcagagcagattgtactgagagtgcaccatatgcggtgtgaaataccgcacagatgcgtaaggagaaaataccgcatcaggcgctcttccgcttcctcgctcactgactcgctgcgctcggtcgttcggctgcggcgagcggtatcagctcactcaaaggcggtaatacggttatccacagaatcaggggataacgcaggaaagaacatgtgagcaaaaggccagcaaaaggccaggaaccgtaaaaaggccgcgttgctggcgtttttccataggctccgcccccctgacgagcatcacaaaaatcgacgctcaagtcagaggtggcgaaacccgacaggactataaagataccaggcgtttccccctggaagctccctcgtgcgctctcctgttccgaccctgccgcttaccggatacctgtccgcctttctcccttcgggaagcgtggcgctttctcatagctcacgctgtaggtatctcagttcggtgtaggtcgttcgctccaagctgggctgtgtgcacgaaccccccgttcagcccgaccgctgcgccttatccggtaactatcgtcttgagtccaacccggtaagacacgacttatcgccactggcagcagccactggtaacaggattagcagagcgaggtatgtaggcggtgctacagagttcttgaagtggtggcctaactacggctacactagaaggacagtatttggtatctgcgctctgctgaagccagttaccttcggaaaaagagttggtagctcttgatccggcaaacaaaccaccgctggtagcggtggtttttttgtttgcaagcagcagattacgcgcagaaaaaaaggatctcaagaagatcctttgatcttttctactgcagaagcttgttagacaccctgtcatgtattttatattatttatttcaccatacggattaagtgaaacctaatgaaaatagtactttcggagctttaactttaatgaaggtatgtttttttatagacatcgatgtctggtttaacaataggaaaaagtagctaaaactcccatgaattaaagaaataacaaggtgtctaacaacctgttattaagaatgttagaaaagacttaacatttgtgttgagtttttatagacattggtgtctagacatacggtagataaggtttgctcaaaaataaaataaaaaaagattggactaaaaaacatttaatttagtacaatttaattagttattttttcgtctcaaattttgctttgttgagcagaaatttagataaaaaaatccccgtgatcagattacaatgtcgttcattgtacgatgtgtcgaaaaatctttacgacactctaaactgaccacacgggggaaaaagaaaactgaactaataacatcatgatactcggaaaacctagcaattctcaacccctaaacaaaagaaacttccaaaaccctgaccatataaaggagtggcaacaatcagcaatcagtcaagatttgatagcagaaaatcttgtatcggttgctaatggttttgatgtactatttatcggcaataaataccgaactaacacgggtgttctgtcacggcacatattaaactcctattctcatttagaagatggtggttcgtatggtagaacatttgacccatttaccaataaagaaatgcagtgggttcaatttaaaccgaatagaccaagaaaaggttctactggtaaggtaatcaaatatgaatcgccaaaaggtgaacctacaagagttctaatgccgtttgtgcctatgaaaatatggcaacggattagcgataagttcggagtaccgattaatccgaaaaaagatactcacttttgggaatgggtaaagaataatccatcgataccgattgccattacagaaggaaataaaaaagctaattgcctattatcctatggctatcctgctattgcctttgtaggcatttggaacggattagagaaaataaatgatttctcgaaggaaaagcagttaaaagaggatttgaaatggttgttatccaacggcaaccgaaatattaatatcatctttgaccaagaccagaaacaaaaaactgtaattaatgtaaacaaagctattttcgctttatcttctctaataagtagaaatggtcataaagttaatattgtgcaatggttgccgtcaaaaggtaaaggaatagatgattatttggtagctttaccttttgagaaaagagaaaatcatttagacaacttaattaaaattgcaccatcatttaatttttggtcaactaaatacttattcaagtgtcgtaaaccagatttaaccgtaaattgccgttatttgagcgatgcagtaaaagaattacctcaagaggatatagcattaatagcacctcacggcacgggtaaaacttcattagtagctactcacgttaagaatcggagttatcacggaaggaaaactatttcattggtgcatcttgaaagtttagccaaagctaatggcaacgcacttggattatattaccgaaccgaaaataatattgaaaagcaatatcttggatttagcttatgtgtagatagttgccgtgataagattaacggcattacaactgatattatttcaggtcaagattattgccttttcattgatgaaattgaccaagtaattccacacatccttaacagtgaaactgaagtaagtaagtatagatgcaccatcattgacactttttctgaactggtgagaaatgctgaacaggtcattattgctgatgctgatttatccgatgtgacgattgacctaatagaaaacatcagaggtaaaaaactatatgtaatcaagaatgaatatcagtatcagggaatgacttttaacgccgttggttcaccattagaaatgatggcaatgatgggaaaatcggtgtcagaaggcaagaaattatttattaacaccacatcccaaaaggcaaaaagtaagtacggcacaatcgctcttgagtcttatatttttggtctaaataaagaagcaaagatattaagaatagactctgaaaccactaaaaaccctgaacatccagcctataaaatcattgaccaagacttaaataatatcctcaaagattatgattatgtcattgcctcaccttgccttcaaacaggtgtcagtattaccttaaaagggcattttgaccagcaatttaacttttccagtggaaacattacacctcattgctttttacagcaaatgtggcggttgagggatgcagaaattgaaagattctattatgtgccgaactcatctaacctcaatctcattgggaataagtcaagttcaccatcagaccttctaaagagcaataacaagatggcaacggcaacggttaaccttttgggtagaatcgactccgaatattccctagagtatgaatcgcacggcatttggcttgagacgtgggcaaaattatcagcacggcataacagttcaatgcgttgttactctgaaattcttacctatctaattacgtctcaagggcataaattaaatatcaacattccctcacctcttgcagatattaagaagctaaatgatgaggtaagtagtaacagggaaaaggtaaaaaatgagagatactctcagaggttaaactcaccagatattaacgatgcagaagctaccatactcgaatctaaagagcaaaaaatcggattgactctcaatgagagatgcaccctagaaaagcataaagttaagaagcggtatgggaatgtaaagatggatattctcacctttgatgatgatggactataccccaaactcagactattttattacctcaccatcggtaaacctcatctcaaggctaatgacagaaaagctattgccaaaatgggcaatgacaataaaggcaagattctatcaaaagacttagttaataaaacttactccgctcgtgtgaaggtcttagagattcttaaactaactgactttatcgacaatcttagagatgaactcttaataactcccaataatccagctatcaccgattttaataatcttctgctaagagctaagaaggatttaagagtattaggagtcaacatcggaaaatatccaatggccaacattaatgccgtacttactctcattggtcacaaactttctgtaatgagagatgagttcggaaaagagaaaaggataaaagtagatggtaaatcataccgatgttatcaacttgaaacattaccagattttaccaatgatactcttgactactggttagaaaatgatagccaaaaagaagtaacagcaacagaaaattactccgaaaattttaacccttcaaatagctacaatccagacagtaagacactttcagagggtgcaaatttcctatatataaataaagaagaattgcatccaaataaattgcacctagaaataaaagaaggtgctgaactttttttattcggggtaaaggtgattgtgaaaggaatcttggacggggcagtaactatattctctatgggtcaagaatacgatttatccctcaatgaactagaggggatgttaacatcatgaactttacaagaatctttttaaagggcgatcgcaccatgttaaatgatggtacatttgttcagatatttgatatttaccatgaccacgcattgggagtgacccttgaccttaagacagaaaaaattatttccgatgatgttagggtaattactgtcaaagacttattgttcgatggcacttataaaggggtaaaatcttttatgcccgataatgcccgataatgcccgattgatgctacaaaatcccataatcataagcgataatcccctaatagcttgtaattcttgaaccgtagcgattttagagtattccaaaaagaagaaataaacaccgcaaaatgtcgtatttcacatatataaaccaaggttttttgccctaaaatctttatgtttgtagtgtgatgttgggtcaaaatggtcagaaaagttgcaaggtttttatggatgcttacgcgcgcgaggggtaagcatccccaaatagttactttatcctagtccatgcccatttattgccgtcccgttcggctttaaaaaagtgccaaaactcacaaggtgcaataaaaagttctgtacctttcgcaaccctagataatctttcaacagttactttttttcctattatctcggtacaaagtttggctagtttctcttttccctctttttcaatcaagccttcttgtatgcccaactcattgattaatctctctatttttaccattatttcccgttcaggtagtttatcccctaaatcttcatcggggggcaatgtagggcattctgaaggggctttttcttctgtctggacattatctaatattgaagtaaccaaactatcttcagttttttctattcctattaattcatattcggttactgtatccgtatcaatatccgaataactatctttatccgtattagctattcggttaagtttatccgttaactcagaaacaagactatatagcggttttagcttttcttctatcctgttatctaatacggataagtttatacggttatcattatccgtattagtatcattgggcttttttggtagttctaccccctcataaaccgcttttattcccaattccaacagactgataacagtatcctttataatgggttttttgctgatatggtgaacttttgccccttccatcattgcgatactttctatctcactcatcaacttatcgcttaagtgaatctcgtatctgtttaatcccttactggttttattcatatccgtttactttattcggttaacaattctattttatacgaataaaatattatacggttaactttatacgtttaactattttatctatacggataacagtaataagttattcgtattagttatacgtttacttttatccaaataaaattagtgcatttaaactaaaagaatgattttatcggagttgatagcattggattaacctaaagatgtttataagctatatctgataagtatttaaggttattttgttattctgtttattgacattatcagaataaaagaatagaatataattgttgagagataagaggtttaagtgattatggttaagaagttagttggttatgtcagggtcagtagtgaatcgcaagaggataacactagcttacagaatcagatagagagaattgaagcatattgtatggcttttggttatgagttggtaaaaatattcaaagaggttgccactggtacaaaagcagatattgaaacccgtcctatttttaatgaagctatagaatacttgaaacaggataatgctaatggaattattgccttgaagctagaccgaatcgcacggaatgctttagatgtattgcgtttggttcgtgaaaccttagaaccacaaaataaaatgttagtgttactagatattcaggtagatacttcgacaccttcaggaaaaatgattttaactgtaatgagtgccgttgctgaactcgaaagagacatgatctatgatcgcactcaggggggtagaaagactaaagcccaaaagggcgggtatgcctacgggaaacctaaatttggctataagactgaagaaaaggaactaaaagaagattcagcacaacaggaaactattaaactaattaagagacaccgtaggtcagggaaaagctaccagaaaatagctgattatctcaatgcccaaagtattcccactaaacaaggtaagaaatggagttctagcgtcgtctatcgaatctgtcaggaaaaagctggttaagtctgtttatagatatttagaatttattgaataaaaatagtatgaacaataaatatttatggactaaccacgctcggaaacgtttaactgaacgatgggaaataaaagaatcatgggttattgataccatcgaaaatcctgaacgttcagaatttattgttgatgagtcaggggaaaaatatcattactataaaagaatagctaagtttaagaatagagtgttagaagtgataacttctgccaactcaacacccacaagaataataaccttttactttaaccgtaacatgaggaaaaatttatgattgttacttacgataatgaagttgacgcaatttattttaagttaacggaaaataaaattgatagcaccgaacctcaaacagacaggattatcattgattacgatgaaagtaataatattgttggcattgaggtattagattttaattatcttgtcaagaaaggtttaaccgttgctgatttacctttttctgaagatgaaagattaacagcttctcaatattttaattttcctgttgctatctaatccagaaggggcaataatccccttctttcatcgagttagacttaatatcacaaaagtcattttcattttaccgtttcttttccacagcgtccgtacgcccctcgttaaatctcaaaaccgacaatttatgatgtttataaaaagttactcactttaataagtatttatactcattaaagggttattctttttttgtagcctgataggttgggaaggaatatttcagattatcagatttgttg

SEQ ID NO: 47 - DNA, 13119 bp, Cyanobacterium sp. ABICyano1
tcgacaattaataacttcttcctgtacgggcgaatggccatttgctcctaactaactccgtactgctttgcggaacgagcgtagcgaactctccgaattactaagccttcatccctgatagatgcaaaaaacgaattaaaattatgtgtaaaaagaaaatgtgtctttatttagtagtcaaagttacaaaatattaagaatcaaattaataatgtattgggcagttaagtatataagtctttaaatatttatttgtattcaatatattaaccgaggacaaattatgaattcttacactgttggaacctatttagcagaacgtttagttcaaattggtctcaaacaccattttgcagtagctggtgattataatttagttttattggataacttattgttaaataagaatatggaacaagtgtattgttgtaatgaattaaactgtggtttttctgctgagggatatgctcgtgcaaaaggtgctgccgcagcagttgttacttattctgttggagcattaagtgcttttgacgctattggaggtgcttatgcagaaaatttacctgtaatcttaatctctggtgcacccaataacaacgatcacgctgctggtcatgtattgcatcatgctttaggtaaaaccgattatcattaccaattagaaatggcaaaaaatattaccgctgccgcagaagctatttatactcccgaagaagcacctgctaagatcgatcacgtaattaaaaccgctctccgtgagaaaaaacccgtatatttagaaatcgcttgcaatatcgcttctatgccttgtgcagctcctggacctgctagtgctttatttaacgatgaagcatctgatgaggctagtttaaatgccgctgttgaagaaactttgaaatttattgctaatcgtgataaagtagctgttttagttggttctaaactccgtgccgctggtgcagaagaagcggctgtaaaattcgcagatgccttaggaggtgctgttgccacaatggcagccgctaaaagttttttccccgaagaaaatcctcattacattggtacttcttggggtgaggtatcttaccctggtgtagaaaaaaccatgaaggaagctgatgcagtaattgcattagctcctgttttcaatgattactctaccactggttggactgatattccagaccccaaaaaattagttttagcagaacctcgctctgtagttgtgaatggtgttagatttcccagtgtacatctcaaagattatttaactcgtttagctcaaaaagtgagtaaaaagactggcgcactcgatttctttaaatctttaaatgctggtgaattaaagaaagcagctcctgctgatcccagtgctcctttagtgaatgccgaaatcgcaagacaagttgaagccttgttaactcctaacactaccgttattgccgagactggtgatagttggttcaatgctcaacgcatgaaattacccaatggtgctcgtgttgagtatgaaatgcaatggggtcacattggatggtctgttcctgctgcatttggatatgcagttggagcacctgagcgtagaaacattttaatggtaggtgatggttctttccaactcactgctcaagaagttgcacaaatggtacgtttaaaattgcctgttattatctttctcattaacaactatggttacaccattgaagttatgattcatgatggtccttataataacattaagaattgggattacgcaggtttaatggaggtatttaacggtaatggtggatacgacagtggagcaggtaaaggattaaaagctaaaacaggaggtgagttagctgaagcaattaaagtagctttagccaatacagatggtcctaccttaatcgaatgtttcattggacgtgaagattgtactgaagagttagttaaatggggaaagcgtgttgccgctgcaaattctcgtaaacctgtaaacaaactcttgtagttaggatccgagctcctccgcttaaaaaatttcatttttcgatcaaaaaagacaaattattactaattagctcatggcaataaataatcagtagtaatctgttttcacattttattgttaatttttattattgctaatatcaaccttttctacttctgcttaatattttatttatgctcaatgggaaaatctgaaataagattgagaacagtgttaccaatagaagtatttaaggtttaaagcataccttaaagataacatttttttttgaaaagagtcaaattatttttgaaaggctgatatttttgatatttactaatattttatttatttctttttcccttaaaataagagctaaatctgtttttattatcatttatcaagctctattaatacctcaactttttcaagaaaaaataataataatttttccctctattctcatgaccttttaggaaaattaattttagaaaaactattgacaaacccataaaaaatgagataagattatagattgtcactggtattttatactagaggcaaattatatttatatatacaaaaatgctgtataaaaaacatctcatatgattaaggcttatgctgcattagaagctaatggtaaattacaaccttttgaatacgatcccggtgctttaggtgcaaatgaagtagaaattgaggttcagtattgtggtgtatgtcattctgatttatctatgattaacaacgaatggggaatttccaattatcccttagttcctggacacgaagttgttggtactgtagcagctatgggagaaggagttaatcatgttgaagtaggtgacttagtaggtttgggatggcattctggttactgtatgacctgtcatagttgtttatctggttatcacaacttatgtgcaactgctgaaagtaccattgttggtcattacggtggttttggtgatagagtaagagctaaaggagttagtgttgttaaattaccaaaaggtatcgacttagcaagtgcaggtcctctcttttgtgggggtattactgtttttagtcctatggttgaattaagtttaaagccaactgcaaaagtagccgtcattggtattggaggattgggacacttagctgttcaatttctccgtgcatggggatgtgaagttactgcctttacttctagtgctcgtaaacaaaccgaggtattagaattaggagcacaccatatcttagattccaccaaccctgaagctatcgctagtgcagagggaaaattcgattatattattagtactgttaatttgaaattagattggaacctctacatctctactttagctccccaaggtcattttcactttgttggagttgtattagaacccctcgatttaaacttattccctttattaatgggacaacgttctgttagtgcatctcctgttggatctcccgctactattgctaccatgttagattttgcagtacgtcacgatattaaacctgtagtagaacaattctctttcgatcaaatcaacgaagctattgctcatttagaaagtggtaaggctcattaccgtgttgttttatctcactctaaaaactaactagatctctgcagagaatataaaaagccagattattaatccggcttttttattatttaaatactgtgcacgatcctgcaggatcatcttgctgaaaaactcgagcgctcgttccgcaaagcggtacggagttagttaggggctaatgggcattctcccgtacaggaaagagttagaagttattaattatcaacaattctcctttgcctagtgcatcgttacctttttaattaaaacataaggaaaactaataatcgtaataatttaacctcaaagtgtaaagaaatgtgaaattctgacttttataacgttaaagagggaaaaattagcagtttaaaatacctagagaatagtctggggtaagcatagagaattagattagttaagttaatcaaattcagaaaaaataataatcgtaaatagttaatctgggtgtatagaaaatgatccccttcatgataagatttaaactcgaaaagcaaaagccaaaaaactaacttccattaaaagaagttgttacatataacgctataaagaaaatttatatatttggaggataccaaccatgtctcatattcaacgtgaaactagttgttctcgccctcgtttaaattctaatatggatgccgatttatatggttataaatgggctcgtgataatgttggtcaatctggtgctactatttatcgtttatatggtaaacctgatgctcctgaattattcttgaaacatggtaaaggttctgttgctaatgatgttactgatgaaatggttcgtttaaactggttgactgaatttatgcctttacctactattaaacattttattcgtactcccgatgatgcttggttattaactactgctattcctggtaaaactgcttttcaagttttagaagaatatcctgattctggtgaaaatattgttgatgctttagctgtttttttacgtcgtttacattctattcccgtttgtaattgtccttttaattctgatcgtgtttttcgtttagctcaagctcaatctcgtatgaataatggtttagttgatgcttctgattttgatgatgaacgtaatggttggcctgttgaacaagtttggaaagaaatgcacaaattgttacctttttctcctgattctgttgttactcatggtgatttttctttagataatttgatctttgatgaaggtaaattgattggttgtattgatgttggtcgtgttggtattgctgatcgttatcaagatttagctattttatggaattgtttaggtgaattttctccttctttacagaaacgtttatttcagaaatatggtattgataatcctgatatgaacaagttacaatttcatttaatgttggacgagttcttttaagaattaattcatgaccaaaatcccttaacgtgagttttcgttccactgagcgtcagaccccgtagaaaagatcaaaggatcttcttgagatcctttttttctgcgcgtaatctgctgctatttaaattacgtacacgtgttattactttgttaacgacaattgtcttaattaactgggcctcatgggccttccgctcactgcccgctttccagtcgggaaacctgtcgtgccagctctgcagatgacggtgaaaacctctgacacatgcagctcccggagacggtcacagcttgtctgtaagcggatgccgggagcagacaagcccgtcagggcgcgtcagcgggtgttggcgggtgtcggggcgcagccatgacccagtcacgtagcgatagcggagtgtatactggcttaactatgcggcatcagagcagattgtactgagagtgcaccatatgcggtgtgaaataccgcacagatgcgtaaggagaaaataccgcatcaggcgctcttccgcttcctcgctcactgactcgctgcgctcggtcgttcggctgcggcgagcggtatcagctcactcaaaggcggtaatacggttatccacagaatcaggggataacgcaggaaagaacatgtgagcaaaaggccagcaaaaggccaggaaccgtaaaaaggccgcgttgctggcgtttttccataggctccgcccccctgacgagcatcacaaaaatcgacgctcaagtcagaggtggcgaaacccgacaggactataaagataccaggcgtttccccctggaagctccctcgtgcgctctcctgttccgaccctgccgcttaccggatacctgtccgcctttctcccttcgggaagcgtggcgctttctcatagctcacgctgtaggtatctcagttcggtgtaggtcgttcgctccaagctgggctgtgtgcacgaaccccccgttcagcccgaccgctgcgccttatccggtaactatcgtcttgagtccaacccggtaagacacgacttatcgccactggcagcagccactggtaacaggattagcagagcgaggtatgtaggcggtgctacagagttcttgaagtggtggcctaactacggctacactagaaggacagtatttggtatctgcgctctgctgaagccagttaccttcggaaaaagagttggtagctcttgatccggcaaacaaaccaccgctggtagcggtggtttttttgtttgcaagcagcagattacgcgcagaaaaaaaggatctcaagaagatcctttgatcttttctactgcagaagcttgttagacaccctgtcatgtattttatattatttatttcaccatacggattaagtgaaacctaatgaaaatagtactttcggagctttaactttaatgaaggtatgtttttttatagacatcgatgtctggtttaacaataggaaaaagtagctaaaactcccatgaattaaagaaataacaaggtgtctaacaacctgttattaagaatgttagaaaagacttaacatttgtgttgagtttttatagacattggtgtctagacatacggtagataaggtttgctcaaaaataaaataaaaaaagattggactaaaaaacatttaatttagtacaatttaattagttattttttcgtctcaaattttgctttgttgagcagaaatttagataaaaaaatccccgtgatcagattacaatgtcgttcattgtacgatgtgtcgaaaaatctttacgacactctaaactgaccacacgggggaaaaagaaaactgaactaataacatcatgatactcggaaaacctagcaattctcaacccctaaacaaaagaaacttccaaaaccctgaccatataaaggagtggcaacaatcagcaatcagtcaagatttgatagcagaaaatcttgtatcggttgctaatggttttgatgtactatttatcggcaataaataccgaactaacacgggtgttctgtcacggcacatattaaactcctattctcatttagaagatggtggttcgtatggtagaacatttgacccatttaccaataaagaaatgcagtgggttcaatttaaaccgaatagaccaagaaaaggttctactggtaaggtaatcaaatatgaatcgccaaaaggtgaacctacaagagttctaatgccgtttgtgcctatgaaaatatggcaacggattagcgataagttcggagtaccgattaatccgaaaaaagatactcacttttgggaatgggtaaagaataatccatcgataccgattgccattacagaaggaaataaaaaagctaattgcctattatcctatggctatcctgctattgcctttgtaggcatttggaacggattagagaaaataaatgatttctcgaaggaaaagcagttaaaagaggatttgaaatggttgttatccaacggcaaccgaaatattaatatcatctttgaccaagaccagaaacaaaaaactgtaattaatgtaaacaaagctattttcgctttatcttctctaataagtagaaatggtcataaagttaatattgtgcaatggttgccgtcaaaaggtaaaggaatagatgattatttggtagctttaccttttgagaaaagagaaaatcatttagacaacttaattaaaattgcaccatcatttaatttttggtcaactaaatacttattcaagtgtcgtaaaccagatttaaccgtaaattgccgttatttgagcgatgcagtaaaagaattacctcaagaggatatagcattaatagcacctcacggcacgggtaaaacttcattagtagctactcacgttaagaatcggagttatcacggaaggaaaactatttcattggtgcatcttgaaagtttagccaaagctaatggcaacgcacttggattatattaccgaaccgaaaataatattgaaaagcaatatcttggatttagcttatgtgtagatagttgccgtgataagattaacggcattacaactgatattatttcaggtcaagattattgccttttcattgatgaaattgaccaagtaattccacacatccttaacagtgaaactgaagtaagtaagtatagatgcaccatcattgacactttttctgaactggtgagaaatgctgaacaggtcattattgctgatgctgatttatccgatgtgacgattgacctaatagaaaacatcagaggtaaaaaactatatgtaatcaagaatgaatatcagtatcagggaatgacttttaacgccgttggttcaccattagaaatgatggcaatgatgggaaaatcggtgtcagaaggcaagaaattatttattaacaccacatcccaaaaggcaaaaagtaagtacggcacaatcgctcttgagtcttatatttttggtctaaataaagaagcaaagatattaagaatagactctgaaaccactaaaaaccctgaacatccagcctataaaatcattgaccaagacttaaataatatcctcaaagattatgattatgtcattgcctcaccttgccttcaaacaggtgtcagtattaccttaaaagggcattttgaccagcaatttaacttttccagtggaaacattacacctcattgctttttacagcaaatgtggcggttgagggatgcagaaattgaaagattctattatgtgccgaactcatctaacctcaatctcattgggaataagtcaagttcaccatcagaccttctaaagagcaataacaagatggcaacggcaacggttaaccttttgggtagaatcgactccgaatattccctagagtatgaatcgcacggcatttggcttgagacgtgggcaaaattatcagcacggcataacagttcaatgcgttgttactctgaaattcttacctatctaattacgtctcaagggcataaattaaatatcaacattccctcacctcttgcagatattaagaagctaaatgatgaggtaagtagtaacagggaaaaggtaaaaaatgagagatactctcagaggttaaactcaccagatattaacgatgcagaagctaccatactcgaatctaaagagcaaaaaatcggattgactctcaatgagagatgcaccctagaaaagcataaagttaagaagcggtatgggaatgtaaagatggatattctcacctttgatgatgatggactataccccaaactcagactattttattacctcaccatcggtaaacctcatctcaaggctaatgacagaaaagctattgccaaaatgggcaatgacaataaaggcaagattctatcaaaagacttagttaataaaacttactccgctcgtgtgaaggtcttagagattcttaaactaactgactttatcgacaatcttagagatgaactcttaataactcccaataatccagctatcaccgattttaataatcttctgctaagagctaagaaggatttaagagtattaggagtcaacatcggaaaatatccaatggccaacattaatgccgtacttactctcattggtcacaaactttctgtaatgagagatgagttcggaaaagagaaaaggataaaagtagatggtaaatcataccgatgttatcaacttgaaacattaccagattttaccaatgatactcttgactactggttagaaaatgatagccaaaaagaagtaacagcaacagaaaattactccgaaaattttaacccttcaaatagctacaatccagacagtaagacactttcagagggtgcaaatttcctatatataaataaagaagaattgcatccaaataaattgcacctagaaataaaagaaggtgctgaactttttttattcggggtaaaggtgattgtgaaaggaatcttggacggggcagtaactatattctctatgggtcaagaatacgatttatccctcaatgaactagaggggatgttaacatcatgaactttacaagaatctttttaaagggcgatcgcaccatgttaaatgatggtacatttgttcagatatttgatatttaccatgaccacgcattgggagtgacccttgaccttaagacagaaaaaattatttccgatgatgttagggtaattactgtcaaagacttattgttcgatggcacttataaaggggtaaaatcttttatgcccgataatgcccgataatgcccgattgatgctacaaaatcccataatcataagcgataatcccctaatagcttgtaattcttgaaccgtagcgattttagagtattccaaaaagaagaaataaacaccgcaaaatgtcgtatttcacatatataaaccaaggttttttgccctaaaatctttatgtttgtagtgtgatgttgggtcaaaatggtcagaaaagttgcaaggtttttatggatgcttacgcgcgcgaggggtaagcatccccaaatagttactttatcctagtccatgcccatttattgccgtcccgttcggctttaaaaaagtgccaaaactcacaaggtgcaataaaaagttctgtacctttcgcaaccctagataatctttcaacagttactttttttcctattatctcggtacaaagtttggctagtttctcttttccctctttttcaatcaagccttcttgtatgcccaactcattgattaatctctctatttttaccattatttcccgttcaggtagtttatcccctaaatcttcatcggggggcaatgtagggcattctgaaggggctttttcttctgtctggacattatctaatattgaagtaaccaaactatcttcagttttttctattcctattaattcatattcggttactgtatccgtatcaatatccgaataactatctttatccgtattagctattcggttaagtttatccgttaactcagaaacaagactatatagcggttttagcttttcttctatcctgttatctaatacggataagtttatacggttatcattatccgtattagtatcattgggcttttttggtagttctaccccctcataaaccgcttttattcccaattccaacagactgataacagtatcctttataatgggttttttgctgatatggtgaacttttgccccttccatcattgcgatactttctatctcactcatcaacttatcgcttaagtgaatctcgtatctgtttaatcccttactggttttattcatatccgtttactttattcggttaacaattctattttatacgaataaaatattatacggttaactttatacgtttaactattttatctatacggataacagtaataagttattcgtattagttatacgtttacttttatccaaataaaattagtgcatttaaactaaaagaatgattttatcggagttgatagcattggattaacctaaagatgtttataagctatatctgataagtatttaaggttattttgttattctgtttattgacattatcagaataaaagaatagaatataattgttgagagataagaggtttaagtgattatggttaagaagttagttggttatgtcagggtcagtagtgaatcgcaagaggataacactagcttacagaatcagatagagagaattgaagcatattgtatggcttttggttatgagttggtaaaaatattcaaagaggttgccactggtacaaaagcagatattgaaacccgtcctatttttaatgaagctatagaatacttgaaacaggataatgctaatggaattattgccttgaagctagaccgaatcgcacggaatgctttagatgtattgcgtttggttcgtgaaaccttagaaccacaaaataaaatgttagtgttactagatattcaggtagatacttcgacaccttcaggaaaaatgattttaactgtaatgagtgccgttgctgaactcgaaagagacatgatctatgatcgcactcaggggggtagaaagactaaagcccaaaagggcgggtatgcctacgggaaacctaaatttggctataagactgaagaaaaggaactaaaagaagattcagcacaacaggaaactattaaactaattaagagacaccgtaggtcagggaaaagctaccagaaaatagctgattatctcaatgcccaaagtattcccactaaacaaggtaagaaatggagttctagcgtcgtctatcgaatctgtcaggaaaaagctggttaagtctgtttatagatatttagaatttattgaataaaaatagtatgaacaataaatatttatggactaaccacgctcggaaacgtttaactgaacgatgggaaataaaagaatcatgggttattgataccatcgaaaatcctgaacgttcagaatttattgttgatgagtcaggggaaaaatatcattactataaaagaatagctaagtttaagaatagagtgttagaagtgataacttctgccaactcaacacccacaagaataataaccttttactttaaccgtaacatgaggaaaaatttatgattgttacttacgataatgaagttgacgcaatttattttaagttaacggaaaataaaattgatagcaccgaacctcaaacagacaggattatcattgattacgatgaaagtaataatattgttggcattgaggtattagattttaattatcttgtcaagaaaggtttaaccgttgctgatttacctttttctgaagatgaaagattaacagcttctcaatattttaattttcctgttgctatctaatccagaaggggcaataatccccttctttcatcgagttagacttaatatcacaaaagtcattttcattttaccgtttcttttccacagcgtccgtacgcccctcgttaaatctcaaaaccgacaatttatgatgtttataaaaagttactcactttaataagtatttatactcattaaagggttattctttttttgtagcctgataggttgggaaggaatatttcagattatcagatttgttgaatatttttcgtcagatacgcaaaccttacaaacataattaacaactgaaactattgatatgtctaggttttagctctatcacaggttggatctg

SEQ ID NO: 48 - DNA, 12648 bp, Cyanobacterium sp. ABICyano1
tcgacaattaataacttcttcctgtacgggcgaatggccatttgctcctaactaactccgtactgctttgcggaacgagcgtagcgaactctccgaattactaagccttcatccctgatagatgcaaaaaacgaattaaaattatgtgtaaaaagaaaatgtgtctttatttagtagtcaaagttacaaaatattaagaatcaaattaataatgtattgggcagttaagtatataagtctttaaatatttatttgtattcaatatattaaccgaggacaaattatgaattcttacactgttggaacctatttagcagaacgtttagttcaaattggtctcaaacaccattttgcagtagctggtgattataatttagttttattggataacttattgttaaataagaatatggaacaagtgtattgttgtaatgaattaaactgtggtttttctgctgagggatatgctcgtgcaaaaggtgctgccgcagcagttgttacttattctgttggagcattaagtgcttttgacgctattggaggtgcttatgcagaaaatttacctgtaatcttaatctctggtgcacccaataacaacgatcacgctgctggtcatgtattgcatcatgctttaggtaaaaccgattatcattaccaattagaaatggcaaaaaatattaccgctgccgcagaagctatttatactcccgaagaagcacctgctaagatcgatcacgtaattaaaaccgctctccgtgagaaaaaacccgtatatttagaaatcgcttgcaatatcgcttctatgccttgtgcagctcctggacctgctagtgctttatttaacgatgaagcatctgatgaggctagtttaaatgccgctgttgaagaaactttgaaatttattgctaatcgtgataaagtagctgttttagttggttctaaactccgtgccgctggtgcagaagaagcggctgtaaaattcgcagatgccttaggaggtgctgttgccacaatggcagccgctaaaagttttttccccgaagaaaatcctcattacattggtacttcttggggtgaggtatcttaccctggtgtagaaaaaaccatgaaggaagctgatgcagtaattgcattagctcctgttttcaatgattactctaccactggttggactgatattccagaccccaaaaaattagttttagcagaacctcgctctgtagttgtgaatggtgttagatttcccagtgtacatctcaaagattatttaactcgtttagctcaaaaagtgagtaaaaagactggcgcactcgatttctttaaatctttaaatgctggtgaattaaagaaagcagctcctgctgatcccagtgctcctttagtgaatgccgaaatcgcaagacaagttgaagccttgttaactcctaacactaccgttattgccgagactggtgatagttggttcaatgctcaacgcatgaaattacccaatggtgctcgtgttgagtatgaaatgcaatggggtcacattggatggtctgttcctgctgcatttggatatgcagttggagcacctgagcgtagaaacattttaatggtaggtgatggttctttccaactcactgctcaagaagttgcacaaatggtacgtttaaaattgcctgttattatctttctcattaacaactatggttacaccattgaagttatgattcatgatggtccttataataacattaagaattgggattacgcaggtttaatggaggtatttaacggtaatggtggatacgacagtggagcaggtaaaggattaaaagctaaaacaggaggtgagttagctgaagcaattaaagtagctttagccaatacagatggtcctaccttaatcgaatgtttcattggacgtgaagattgtactgaagagttagttaaatggggaaagcgtgttgccgctgcaaattctcgtaaacctgtaaacaaactcttgtagttaggatccgagctcagcaagtttcatcccgaccccctcagggtcgggatttttttattgtactagttgacataagtaaaggcatcccctgcgtgatataattaccttcagtttaaggaggtatacacatatgattaaagcctacgctgccctggaagccaacggaaaactccaaccctttgaatacgaccccggtgccctgggtgctaatgaggtggagattgaggtgcagtattgtggggtgtgccacagtgatttgtccatgattaataacgaatggggcatttccaattaccccctagtgccgggtcatgaggtggtgggtactgtggccgccatgggcgaaggggtgaaccatgttgaggtgggggatttagtggggctgggttggcattcgggctactgcatgacctgccatagttgtttatctggctaccacaacctttgtgccacggcggaatcgaccattgtgggccactacggtggctttggcgatcgggttcgggccaagggagtcagcgtggtgaaattacctaaaggcattgacctagccagtgccgggccccttttctgtggaggaattaccgttttcagtcctatggtggaactgagtttaaagcccactgcaaaagtggcagtgatcggcattgggggcttgggccatttagcggtgcaatttctccgggcctggggctgtgaagtgactgcctttacctccagtgccaggaagcaaacggaagtgttggaattgggcgctcaccacatactagattccaccaatccagaggcgatcgccagtgcggaaggcaaatttgactatattatctccactgtgaacctgaagcttgactggaacttatacatcagcaccctggcgccccagggacatttccactttgttggggtggtgttggagcctttggatctaaatctttttccccttttgatgggacaacgctccgtttctgcctccccagtgggtagtcccgccaccattgccaccatgttggactttgctgtgcgccatgacattaaacccgtggtggaacaatttagctttgatcagatcaacgaggcgatcgcccatctagaaagcggcaaagcccattatcgggtagtgctcagccatagtaaaaattagctctgcaaaggttgcttctgggtccgtggaacgctcggttgccgccgggcgttttttattcctgcaggatcatcttgctgaaaaactcgagcgctcgttccgcaaagcggtacggagttagttaggggctaatgggcattctcccgtacaggaaagagttagaagttattaattatcaacaattctcctttgcctagtgcatcgttacctttttaattaaaacataaggaaaactaataatcgtaataatttaacctcaaagtgtaaagaaatgtgaaattctgacttttataacgttaaagagggaaaaattagcagtttaaaatacctagagaatagtctggggtaagcatagagaattagattagttaagttaatcaaattcagaaaaaataataatcgtaaatagttaatctgggtgtatagaaaatgatccccttcatgataagatttaaactcgaaaagcaaaagccaaaaaactaacttccattaaaagaagttgttacatataacgctataaagaaaatttatatatttggaggataccaaccatgtctcatattcaacgtgaaactagttgttctcgccctcgtttaaattctaatatggatgccgatttatatggttataaatgggctcgtgataatgttggtcaatctggtgctactatttatcgtttatatggtaaacctgatgctcctgaattattcttgaaacatggtaaaggttctgttgctaatgatgttactgatgaaatggttcgtttaaactggttgactgaatttatgcctttacctactattaaacattttattcgtactcccgatgatgcttggttattaactactgctattcctggtaaaactgcttttcaagttttagaagaatatcctgattctggtgaaaatattgttgatgctttagctgtttttttacgtcgtttacattctattcccgtttgtaattgtccttttaattctgatcgtgtttttcgtttagctcaagctcaatctcgtatgaataatggtttagttgatgcttctgattttgatgatgaacgtaatggttggcctgttgaacaagtttggaaagaaatgcacaaattgttacctttttctcctgattctgttgttactcatggtgatttttctttagataatttgatctttgatgaaggtaaattgattggttgtattgatgttggtcgtgttggtattgctgatcgttatcaagatttagctattttatggaattgtttaggtgaattttctccttctttacagaaacgtttatttcagaaatatggtattgataatcctgatatgaacaagttacaatttcatttaatgttggacgagttcttttaagaattaattcatgaccaaaatcccttaacgtgagttttcgttccactgagcgtcagaccccgtagaaaagatcaaaggatcttcttgagatcctttttttctgcgcgtaatctgctgctatttaaattacgtacacgtgttattactttgttaacgacaattgtcttaattaactgggcctcatgggccttccgctcactgcccgctttccagtcgggaaacctgtcgtgccagctctgcagatgacggtgaaaacctctgacacatgcagctcccggagacggtcacagcttgtctgtaagcggatgccgggagcagacaagcccgtcagggcgcgtcagcgggtgttggcgggtgtcggggcgcagccatgacccagtcacgtagcgatagcggagtgtatactggcttaactatgcggcatcagagcagattgtactgagagtgcaccatatgcggtgtgaaataccgcacagatgcgtaaggagaaaataccgcatcaggcgctcttccgcttcctcgctcactgactcgctgcgctcggtcgttcggctgcggcgagcggtatcagctcactcaaaggcggtaatacggttatccacagaatcaggggataacgcaggaaagaacatgtgagcaaaaggccagcaaaaggccaggaaccgtaaaaaggccgcgttgctggcgtttttccataggctccgcccccctgacgagcatcacaaaaatcgacgctcaagtcagaggtggcgaaacccgacaggactataaagataccaggcgtttccccctggaagctccctcgtgcgctctcctgttccgaccctgccgcttaccggatacctgtccgcctttctcccttcgggaagcgtggcgctttctcatagctcacgctgtaggtatctcagttcggtgtaggtcgttcgctccaagctgggctgtgtgcacgaaccccccgttcagcccgaccgctgcgccttatccggtaactatcgtcttgagtccaacccggtaagacacgacttatcgccactggcagcagccactggtaacaggattagcagagcgaggtatgtaggcggtgctacagagttcttgaagtggtggcctaactacggctacactagaaggacagtatttggtatctgcgctctgctgaagccagttaccttcggaaaaagagttggtagctcttgatccggcaaacaaaccaccgctggtagcggtggtttttttgtttgcaagcagcagattacgcgcagaaaaaaaggatctcaagaagatcctttgatcttttctactgcagaagcttgttagacaccctgtcatgtattttatattatttatttcaccatacggattaagtgaaacctaatgaaaatagtactttcggagctttaactttaatgaaggtatgtttttttatagacatcgatgtctggtttaacaataggaaaaagtagctaaaactcccatgaattaaagaaataacaaggtgtctaacaacctgttattaagaatgttagaaaagacttaacatttgtgttgagtttttatagacattggtgtctagacatacggtagataaggtttgctcaaaaataaaataaaaaaagattggactaaaaaacatttaatttagtacaatttaattagttattttttcgtctcaaattttgctttgttgagcagaaatttagataaaaaaatccccgtgatcagattacaatgtcgttcattgtacgatgtgtcgaaaaatctttacgacactctaaactgaccacacgggggaaaaagaaaactgaactaataacatcatgatactcggaaaacctagcaattctcaacccctaaacaaaagaaacttccaaaaccctgaccatataaaggagtggcaacaatcagcaatcagtcaagatttgatagcagaaaatcttgtatcggttgctaatggttttgatgtactatttatcggcaataaataccgaactaacacgggtgttctgtcacggcacatattaaactcctattctcatttagaagatggtggttcgtatggtagaacatttgacccatttaccaataaagaaatgcagtgggttcaatttaaaccgaatagaccaagaaaaggttctactggtaaggtaatcaaatatgaatcgccaaaaggtgaacctacaagagttctaatgccgtttgtgcctatgaaaatatggcaacggattagcgataagttcggagtaccgattaatccgaaaaaagatactcacttttgggaatgggtaaagaataatccatcgataccgattgccattacagaaggaaataaaaaagctaattgcctattatcctatggctatcctgctattgcctttgtaggcatttggaacggattagagaaaataaatgatttctcgaaggaaaagcagttaaaagaggatttgaaatggttgttatccaacggcaaccgaaatattaatatcatctttgaccaagaccagaaacaaaaaactgtaattaatgtaaacaaagctattttcgctttatcttctctaataagtagaaatggtcataaagttaatattgtgcaatggttgccgtcaaaaggtaaaggaatagatgattatttggtagctttaccttttgagaaaagagaaaatcatttagacaacttaattaaaattgcaccatcatttaatttttggtcaactaaatacttattcaagtgtcgtaaaccagatttaaccgtaaattgccgttatttgagcgatgcagtaaaagaattacctcaagaggatatagcattaatagcacctcacggcacgggtaaaacttcattagtagctactcacgttaagaatcggagttatcacggaaggaaaactatttcattggtgcatcttgaaagtttagccaaagctaatggcaacgcacttggattatattaccgaaccgaaaataatattgaaaagcaatatcttggatttagcttatgtgtagatagttgccgtgataagattaacggcattacaactgatattatttcaggtcaagattattgccttttcattgatgaaattgaccaagtaattccacacatccttaacagtgaaactgaagtaagtaagtatagatgcaccatcattgacactttttctgaactggtgagaaatgctgaacaggtcattattgctgatgctgatttatccgatgtgacgattgacctaatagaaaacatcagaggtaaaaaactatatgtaatcaagaatgaatatcagtatcagggaatgacttttaacgccgttggttcaccattagaaatgatggcaatgatgggaaaatcggtgtcagaaggcaagaaattatttattaacaccacatcccaaaaggcaaaaagtaagtacggcacaatcgctcttgagtcttatatttttggtctaaataaagaagcaaagatattaagaatagactctgaaaccactaaaaaccctgaacatccagcctataaaatcattgaccaagacttaaataatatcctcaaagattatgattatgtcattgcctcaccttgccttcaaacaggtgtcagtattaccttaaaagggcattttgaccagcaatttaacttttccagtggaaacattacacctcattgctttttacagcaaatgtggcggttgagggatgcagaaattgaaagattctattatgtgccgaactcatctaacctcaatctcattgggaataagtcaagttcaccatcagaccttctaaagagcaataacaagatggcaacggcaacggttaaccttttgggtagaatcgactccgaatattccctagagtatgaatcgcacggcatttggcttgagacgtgggcaaaattatcagcacggcataacagttcaatgcgttgttactctgaaattcttacctatctaattacgtctcaagggcataaattaaatatcaacattccctcacctcttgcagatattaagaagctaaatgatgaggtaagtagtaacagggaaaaggtaaaaaatgagagatactctcagaggttaaactcaccagatattaacgatgcagaagctaccatactcgaatctaaagagcaaaaaatcggattgactctcaatgagagatgcaccctagaaaagcataaagttaagaagcggtatgggaatgtaaagatggatattctcacctttgatgatgatggactataccccaaactcagactattttattacctcaccatcggtaaacctcatctcaaggctaatgacagaaaagctattgccaaaatgggcaatgacaataaaggcaagattctatcaaaagacttagttaataaaacttactccgctcgtgtgaaggtcttagagattcttaaactaactgactttatcgacaatcttagagatgaactcttaataactcccaataatccagctatcaccgattttaataatcttctgctaagagctaagaaggatttaagagtattaggagtcaacatcggaaaatatccaatggccaacattaatgccgtacttactctcattggtcacaaactttctgtaatgagagatgagttcggaaaagagaaaaggataaaagtagatggtaaatcataccgatgttatcaacttgaaacattaccagattttaccaatgatactcttgactactggttagaaaatgatagccaaaaagaagtaacagcaacagaaaattactccgaaaattttaacccttcaaatagctacaatccagacagtaagacactttcagagggtgcaaatttcctatatataaataaagaagaattgcatccaaataaattgcacctagaaataaaagaaggtgctgaactttttttattcggggtaaaggtgattgtgaaaggaatcttggacggggcagtaactatattctctatgggtcaagaatacgatttatccctcaatgaactagaggggatgttaacatcatgaactttacaagaatctttttaaagggcgatcgcaccatgttaaatgatggtacatttgttcagatatttgatatttaccatgaccacgcattgggagtgacccttgaccttaagacagaaaaaattatttccgatgatgttagggtaattactgtcaaagacttattgttcgatggcacttataaaggggtaaaatcttttatgcccgataatgcccgataatgcccgattgatgctacaaaatcccataatcataagcgataatcccctaatagcttgtaattcttgaaccgtagcgattttagagtattccaaaaagaagaaataaacaccgcaaaatgtcgtatttcacatatataaaccaaggttttttgccctaaaatctttatgtttgtagtgtgatgttgggtcaaaatggtcagaaaagttgcaaggtttttatggatgcttacgcgcgcgaggggtaagcatccccaaatagttactttatcctagtccatgcccatttattgccgtcccgttcggctttaaaaaagtgccaaaactcacaaggtgcaataaaaagttctgtacctttcgcaaccctagataatctttcaacagttactttttttcctattatctcggtacaaagtttggctagtttctcttttccctctttttcaatcaagccttcttgtatgcccaactcattgattaatctctctatttttaccattatttcccgttcaggtagtttatcccctaaatcttcatcggggggcaatgtagggcattctgaaggggctttttcttctgtctggacattatctaatattgaagtaaccaaactatcttcagttttttctattcctattaattcatattcggttactgtatccgtatcaatatccgaataactatctttatccgtattagctattcggttaagtttatccgttaactcagaaacaagactatatagcggttttagcttttcttctatcctgttatctaatacggataagtttatacggttatcattatccgtattagtatcattgggcttttttggtagttctaccccctcataaaccgcttttattcccaattccaacagactgataacagtatcctttataatgggttttttgctgatatggtgaacttttgccccttccatcattgcgatactttctatctcactcatcaacttatcgcttaagtgaatctcgtatctgtttaatcccttactggttttattcatatccgtttactttattcggttaacaattctattttatacgaataaaatattatacggttaactttatacgtttaactattttatctatacggataacagtaataagttattcgtattagttatacgtttacttttatccaaataaaattagtgcatttaaactaaaagaatgattttatcggagttgatagcattggattaacctaaagatgtttataagctatatctgataagtatttaaggttattttgttattctgtttattgacattatcagaataaaagaatagaatataattgttgagagataagaggtttaagtgattatggttaagaagttagttggttatgtcagggtcagtagtgaatcgcaagaggataacactagcttacagaatcagatagagagaattgaagcatattgtatggcttttggttatgagttggtaaaaatattcaaagaggttgccactggtacaaaagcagatattgaaacccgtcctatttttaatgaagctatagaatacttgaaacaggataatgctaatggaattattgccttgaagctagaccgaatcgcacggaatgctttagatgtattgcgtttggttcgtgaaaccttagaaccacaaaataaaatgttagtgttactagatattcaggtagatacttcgacaccttcaggaaaaatgattttaactgtaatgagtgccgttgctgaactcgaaagagacatgatctatgatcgcactcaggggggtagaaagactaaagcccaaaagggcgggtatgcctacgggaaacctaaatttggctataagactgaagaaaaggaactaaaagaagattcagcacaacaggaaactattaaactaattaagagacaccgtaggtcagggaaaagctaccagaaaatagctgattatctcaatgcccaaagtattcccactaaacaaggtaagaaatggagttctagcgtcgtctatcgaatctgtcaggaaaaagctggttaagtctgtttatagatatttagaatttattgaataaaaatagtatgaacaataaatatttatggactaaccacgctcggaaacgtttaactgaacgatgggaaataaaagaatcatgggttattgataccatcgaaaatcctgaacgttcagaatttattgttgatgagtcaggggaaaaatatcattactataaaagaatagctaagtttaagaatagagtgttagaagtgataacttctgccaactcaacacccacaagaataataaccttttactttaaccgtaacatgaggaaaaatttatgattgttacttacgataatgaagttgacgcaatttattttaagttaacggaaaataaaattgatagcaccgaacctcaaacagacaggattatcattgattacgatgaaagtaataatattgttggcattgaggtattagattttaattatcttgtcaagaaaggtttaaccgttgctgatttacctttttctgaagatgaaagattaacagcttctcaatattttaattttcctgttgctatctaatccagaaggggcaataatccccttctttcatcgagttagacttaatatcacaaaagtcattttcattttaccgtttcttttccacagcgtccgtacgcccctcgttaaatctcaaaaccgacaatttatgatgtttataaaaagttactcactttaataagtatttatactcattaaagggttattctttttttgtagcctgataggttgggaaggaatatttcagattatcagatttgttgaatatttttcgtcagatacgcaaaccttacaaacataattaacaactgaaactattgatatgtctaggttttagctctatcacaggttggatctg

SEQ ID NO: 49 - DNA, 13165 bp, Cyanobacterium sp. ABICyano1
gatccagcaagtttcatcccgaccccctcagggtcgggatttttttattgtgagctcctccgcttaaaaaatttcatttttcgatcaaaaaagacaaattattactaattagctcatggcaataaataatcagtagtaatctgttttcacattttattgttaatttttattattgctaatatcaaccttttctacttctgcttaatattttatttatgctcaatgggaaaatctgaaataagattgagaacagtgttaccaatagaagtatttaaggtttaaagcataccttaaagataacatttttttttgaaaagagtcaaattatttttgaaaggctgatatttttgatatttactaatattttatttatttctttttcccttaaaataagagctaaatctgtttttattatcatttatcaagctctattaatacctcaactttttcaagaaaaaataataataatttttccctctattctcatgaccttttaggaaaattaattttagaaaaactattgacaaacccataaaaaatgagataagattatagattgtcactggtattttatactagaggcaaattatatttatatatacaaaaatgctgtataaaaaacatctcatatgattaaggcttatgctgcattagaagctaatggtaaattacaaccttttgaatacgatcccggtgctttaggtgcaaatgaagtagaaattgaggttcagtattgtggtgtatgtcattctgatttatctatgattaacaacgaatggggaatttccaattatcccttagttcctggacacgaagttgttggtactgtagcagctatgggagaaggagttaatcatgttgaagtaggtgacttagtaggtttgggatggcattctggttactgtatgacctgtcatagttgtttatctggttatcacaacttatgtgcaactgctgaaagtaccattgttggtcattacggtggttttggtgatagagtaagagctaaaggagttagtgttgttaaattaccaaaaggtatcgacttagcaagtgcaggtcctctcttttgtgggggtattactgtttttagtcctatggttgaattaagtttaaagccaactgcaaaagtagccgtcattggtattggaggattgggacacttagctgttcaatttctccgtgcatggggatgtgaagttactgcctttacttctagtgctcgtaaacaaaccgaggtattagaattaggagcacaccatatcttagattccaccaaccctgaagctatcgctagtgcagagggaaaattcgattatattattagtactgttaatttgaaattagattggaacctctacatctctactttagctccccaaggtcattttcactttgttggagttgtattagaacccctcgatttaaacttattccctttattaatgggacaacgttctgttagtgcatctcctgttggatctcccgctactattgctaccatgttagattttgcagtacgtcacgatattaaacctgtagtagaacaattctctttcgatcaaatcaacgaagctattgctcatttagaaagtggtaaggctcattaccgtgttgttttatctcactctaaaaactaactagatctctgcagagaatataaaaagccagattattaatccggcttttttattatttaaatactgtgcacgatcctgcaggatcatcttgctgaaaaactcgagcgctcgttccgcaaagcggtacggagttagttaggggctaatgggcattctcccgtacaggaaagagttagaagttattaattatcaacaattctcctttgcctagtgcatcgttacctttttaattaaaacataaggaaaactaataatcgtaataatttaacctcaaagtgtaaagaaatgtgaaattctgacttttataacgttaaagagggaaaaattagcagtttaaaatacctagagaatagtctggggtaagcatagagaattagattagttaagttaatcaaattcagaaaaaataataatcgtaaatagttaatctgggtgtatagaaaatgatccccttcatgataagatttaaactcgaaaagcaaaagccaaaaaactaacttccattaaaagaagttgttacatataacgctataaagaaaatttatatatttggaggataccaaccatgtctcatattcaacgtgaaactagttgttctcgccctcgtttaaattctaatatggatgccgatttatatggttataaatgggctcgtgataatgttggtcaatctggtgctactatttatcgtttatatggtaaacctgatgctcctgaattattcttgaaacatggtaaaggttctgttgctaatgatgttactgatgaaatggttcgtttaaactggttgactgaatttatgcctttacctactattaaacattttattcgtactcccgatgatgcttggttattaactactgctattcctggtaaaactgcttttcaagttttagaagaatatcctgattctggtgaaaatattgttgatgctttagctgtttttttacgtcgtttacattctattcccgtttgtaattgtccttttaattctgatcgtgtttttcgtttagctcaagctcaatctcgtatgaataatggtttagttgatgcttctgattttgatgatgaacgtaatggttggcctgttgaacaagtttggaaagaaatgcacaaattgttacctttttctcctgattctgttgttactcatggtgatttttctttagataatttgatctttgatgaaggtaaattgattggttgtattgatgttggtcgtgttggtattgctgatcgttatcaagatttagctattttatggaattgtttaggtgaattttctccttctttacagaaacgtttatttcagaaatatggtattgataatcctgatatgaacaagttacaatttcatttaatgttggacgagttcttttaagaattaattcatgaccaaaatcccttaacgtgagttttcgttccactgagcgtcagaccccgtagaaaagatcaaaggatcttcttgagatcctttttttctgcgcgtaatctgctgctatttaaattacgtacacgtgttattactttgttaacgacaattgtcttaattaactgggcctcatgggccttccgctcactgcccgctttccagtcgggaaacctgtcgtgccagctctgcagatgacggtgaaaacctctgacacatgcagctcccggagacggtcacagcttgtctgtaagcggatgccgggagcagacaagcccgtcagggcgcgtcagcgggtgttggcgggtgtcggggcgcagccatgacccagtcacgtagcgatagcggagtgtatactggcttaactatgcggcatcagagcagattgtactgagagtgcaccatatgcggtgtgaaataccgcacagatgcgtaaggagaaaataccgcatcaggcgctcttccgcttcctcgctcactgactcgctgcgctcggtcgttcggctgcggcgagcggtatcagctcactcaaaggcggtaatacggttatccacagaatcaggggataacgcaggaaagaacatgtgagcaaaaggccagcaaaaggccaggaaccgtaaaaaggccgcgttgctggcgtttttccataggctccgcccccctgacgagcatcacaaaaatcgacgctcaagtcagaggtggcgaaacccgacaggactataaagataccaggcgtttccccctggaagctccctcgtgcgctctcctgttccgaccctgccgcttaccggatacctgtccgcctttctcccttcgggaagcgtggcgctttctcatagctcacgctgtaggtatctcagttcggtgtaggtcgttcgctccaagctgggctgtgtgcacgaaccccccgttcagcccgaccgctgcgccttatccggtaactatcgtcttgagtccaacccggtaagacacgacttatcgccactggcagcagccactggtaacaggattagcagagcgaggtatgtaggcggtgctacagagttcttgaagtggtggcctaactacggctacactagaaggacagtatttggtatctgcgctctgctgaagccagttaccttcggaaaaagagttggtagctcttgatccggcaaacaaaccaccgctggtagcggtggtttttttgtttgcaagcagcagattacgcgcagaaaaaaaggatctcaagaagatcctttgatcttttctactgcagaagcttgttagacaccctgtcatgtattttatattatttatttcaccatacggattaagtgaaacctaatgaaaatagtactttcggagctttaactttaatgaaggtatgtttttttatagacatcgatgtctggtttaacaataggaaaaagtagctaaaactcccatgaattaaagaaataacaaggtgtctaacaacctgttattaagaatgttagaaaagacttaacatttgtgttgagtttttatagacattggtgtctagacatacggtagataaggtttgctcaaaaataaaataaaaaaagattggactaaaaaacatttaatttagtacaatttaattagttattttttcgtctcaaattttgctttgttgagcagaaatttagataaaaaaatccccgtgatcagattacaatgtcgttcattgtacgatgtgtcgaaaaatctttacgacactctaaactgaccacacgggggaaaaagaaaactgaactaataacatcatgatactcggaaaacctagcaattctcaacccctaaacaaaagaaacttccaaaaccctgaccatataaaggagtggcaacaatcagcaatcagtcaagatttgatagcagaaaatcttgtatcggttgctaatggttttgatgtactatttatcggcaataaataccgaactaacacgggtgttctgtcacggcacatattaaactcctattctcatttagaagatggtggttcgtatggtagaacatttgacccatttaccaataaagaaatgcagtgggttcaatttaaaccgaatagaccaagaaaaggttctactggtaaggtaatcaaatatgaatcgccaaaaggtgaacctacaagagttctaatgccgtttgtgcctatgaaaatatggcaacggattagcgataagttcggagtaccgattaatccgaaaaaagatactcacttttgggaatgggtaaagaataatccatcgataccgattgccattacagaaggaaataaaaaagctaattgcctattatcctatggctatcctgctattgcctttgtaggcatttggaacggattagagaaaataaatgatttctcgaaggaaaagcagttaaaagaggatttgaaatggttgttatccaacggcaaccgaaatattaatatcatctttgaccaagaccagaaacaaaaaactgtaattaatgtaaacaaagctattttcgctttatcttctctaataagtagaaatggtcataaagttaatattgtgcaatggttgccgtcaaaaggtaaaggaatagatgattatttggtagctttaccttttgagaaaagagaaaatcatttagacaacttaattaaaattgcaccatcatttaatttttggtcaactaaatacttattcaagtgtcgtaaaccagatttaaccgtaaattgccgttatttgagcgatgcagtaaaagaattacctcaagaggatatagcattaatagcacctcacggcacgggtaaaacttcattagtagctactcacgttaagaatcggagttatcacggaaggaaaactatttcattggtgcatcttgaaagtttagccaaagctaatggcaacgcacttggattatattaccgaaccgaaaataatattgaaaagcaatatcttggatttagcttatgtgtagatagttgccgtgataagattaacggcattacaactgatattatttcaggtcaagattattgccttttcattgatgaaattgaccaagtaattccacacatccttaacagtgaaactgaagtaagtaagtatagatgcaccatcattgacactttttctgaactggtgagaaatgctgaacaggtcattattgctgatgctgatttatccgatgtgacgattgacctaatagaaaacatcagaggtaaaaaactatatgtaatcaagaatgaatatcagtatcagggaatgacttttaacgccgttggttcaccattagaaatgatggcaatgatgggaaaatcggtgtcagaaggcaagaaattatttattaacaccacatcccaaaaggcaaaaagtaagtacggcacaatcgctcttgagtcttatatttttggtctaaataaagaagcaaagatattaagaatagactctgaaaccactaaaaaccctgaacatccagcctataaaatcattgaccaagacttaaataatatcctcaaagattatgattatgtcattgcctcaccttgccttcaaacaggtgtcagtattaccttaaaagggcattttgaccagcaatttaacttttccagtggaaacattacacctcattgctttttacagcaaatgtggcggttgagggatgcagaaattgaaagattctattatgtgccgaactcatctaacctcaatctcattgggaataagtcaagttcaccatcagaccttctaaagagcaataacaagatggcaacggcaacggttaaccttttgggtagaatcgactccgaatattccctagagtatgaatcgcacggcatttggcttgagacgtgggcaaaattatcagcacggcataacagttcaatgcgttgttactctgaaattcttacctatctaattacgtctcaagggcataaattaaatatcaacattccctcacctcttgcagatattaagaagctaaatgatgaggtaagtagtaacagggaaaaggtaaaaaatgagagatactctcagaggttaaactcaccagatattaacgatgcagaagctaccatactcgaatctaaagagcaaaaaatcggattgactctcaatgagagatgcaccctagaaaagcataaagttaagaagcggtatgggaatgtaaagatggatattctcacctttgatgatgatggactataccccaaactcagactattttattacctcaccatcggtaaacctcatctcaaggctaatgacagaaaagctattgccaaaatgggcaatgacaataaaggcaagattctatcaaaagacttagttaataaaacttactccgctcgtgtgaaggtcttagagattcttaaactaactgactttatcgacaatcttagagatgaactcttaataactcccaataatccagctatcaccgattttaataatcttctgctaagagctaagaaggatttaagagtattaggagtcaacatcggaaaatatccaatggccaacattaatgccgtacttactctcattggtcacaaactttctgtaatgagagatgagttcggaaaagagaaaaggataaaagtagatggtaaatcataccgatgttatcaacttgaaacattaccagattttaccaatgatactcttgactactggttagaaaatgatagccaaaaagaagtaacagcaacagaaaattactccgaaaattttaacccttcaaatagctacaatccagacagtaagacactttcagagggtgcaaatttcctatatataaataaagaagaattgcatccaaataaattgcacctagaaataaaagaaggtgctgaactttttttattcggggtaaaggtgattgtgaaaggaatcttggacggggcagtaactatattctctatgggtcaagaatacgatttatccctcaatgaactagaggggatgttaacatcatgaactttacaagaatctttttaaagggcgatcgcaccatgttaaatgatggtacatttgttcagatatttgatatttaccatgaccacgcattgggagtgacccttgaccttaagacagaaaaaattatttccgatgatgttagggtaattactgtcaaagacttattgttcgatggcacttataaaggggtaaaatcttttatgcccgataatgcccgataatgcccgattgatgctacaaaatcccataatcataagcgataatcccctaatagcttgtaattcttgaaccgtagcgattttagagtattccaaaaagaagaaataaacaccgcaaaatgtcgtatttcacatatataaaccaaggttttttgccctaaaatctttatgtttgtagtgtgatgttgggtcaaaatggtcagaaaagttgcaaggtttttatggatgcttacgcgcgcgaggggtaagcatccccaaatagttactttatcctagtccatgcccatttattgccgtcccgttcggctttaaaaaagtgccaaaactcacaaggtgcaataaaaagttctgtacctttcgcaaccctagataatctttcaacagttactttttttcctattatctcggtacaaagtttggctagtttctcttttccctctttttcaatcaagccttcttgtatgcccaactcattgattaatctctctatttttaccattatttcccgttcaggtagtttatcccctaaatcttcatcggggggcaatgtagggcattctgaaggggctttttcttctgtctggacattatctaatattgaagtaaccaaactatcttcagttttttctattcctattaattcatattcggttactgtatccgtatcaatatccgaataactatctttatccgtattagctattcggttaagtttatccgttaactcagaaacaagactatatagcggttttagcttttcttctatcctgttatctaatacggataagtttatacggttatcattatccgtattagtatcattgggcttttttggtagttctaccccctcataaaccgcttttattcccaattccaacagactgataacagtatcctttataatgggttttttgctgatatggtgaacttttgccccttccatcattgcgatactttctatctcactcatcaacttatcgcttaagtgaatctcgtatctgtttaatcccttactggttttattcatatccgtttactttattcggttaacaattctattttatacgaataaaatattatacggttaactttatacgtttaactattttatctatacggataacagtaataagttattcgtattagttatacgtttacttttatccaaataaaattagtgcatttaaactaaaagaatgattttatcggagttgatagcattggattaacctaaagatgtttataagctatatctgataagtatttaaggttattttgttattctgtttattgacattatcagaataaaagaatagaatataattgttgagagataagaggtttaagtgattatggttaagaagttagttggttatgtcagggtcagtagtgaatcgcaagaggataacactagcttacagaatcagatagagagaattgaagcatattgtatggcttttggttatgagttggtaaaaatattcaaagaggttgccactggtacaaaagcagatattgaaacccgtcctatttttaatgaagctatagaatacttgaaacaggataatgctaatggaattattgccttgaagctagaccgaatcgcacggaatgctttagatgtattgcgtttggttcgtgaaaccttagaaccacaaaataaaatgttagtgttactagatattcaggtagatacttcgacaccttcaggaaaaatgattttaactgtaatgagtgccgttgctgaactcgaaagagacatgatctatgatcgcactcaggggggtagaaagactaaagcccaaaagggcgggtatgcctacgggaaacctaaatttggctataagactgaagaaaaggaactaaaagaagattcagcacaacaggaaactattaaactaattaagagacaccgtaggtcagggaaaagctaccagaaaatagctgattatctcaatgcccaaagtattcccactaaacaaggtaagaaatggagttctagcgtcgtctatcgaatctgtcaggaaaaagctggttaagtctgtttatagatatttagaatttattgaataaaaatagtatgaacaataaatatttatggactaaccacgctcggaaacgtttaactgaacgatgggaaataaaagaatcatgggttattgataccatcgaaaatcctgaacgttcagaatttattgttgatgagtcaggggaaaaatatcattactataaaagaatagctaagtttaagaatagagtgttagaagtgataacttctgccaactcaacacccacaagaataataaccttttactttaaccgtaacatgaggaaaaatttatgattgttacttacgataatgaagttgacgcaatttattttaagttaacggaaaataaaattgatagcaccgaacctcaaacagacaggattatcattgattacgatgaaagtaataatattgttggcattgaggtattagattttaattatcttgtcaagaaaggtttaaccgttgctgatttacctttttctgaagatgaaagattaacagcttctcaatattttaattttcctgttgctatctaatccagaaggggcaataatccccttctttcatcgagttagacttaatatcacaaaagtcattttcattttaccgtttcttttccacagcgtccgtacgcccctcgttaaatctcaaaaccgacaatttatgatgtttataaaaagttactcactttaataagtatttatactcattaaagggttattctttttttgtagcctgataggttgggaaggaatatttcagattatcagatttgttgaatatttttcgtcagatacgcaaaccttacaaacataattaacaactgaaactattgatatgtctaggttttagctctatcacaggttggatctgtcgacaattaataacttcttcctgtacgggcgaatggccatttgctcctaactaactccgtactgctttgcggaacgagcgtagcgaactctccgaattactaagccttcatccctgatagatgcaaaaaacgaattaaaattatgtgtaaaaagaaaatgtgtctttatttagtagtcaaagttacaaaatattaagaatcaaattaataatgtattgggcagttaagtatataagtctttaaatatttatttgtattcaatatattaaccgaggacaaattatgaattcttacactgttggaacctatttagcagaacgtttagttcaaattggtctcaaacaccattttgcagtagctggtgattataatttagttttattggataacttattgttaaataagaatatggaacaagtgtattgttgtaatgaattaaactgtggtttttctgctgagggatatgctcgtgcaaaaggtgctgccgcagcagttgttacttattctgttggagcattaagtgcttttgacgctattggaggtgcttatgcagaaaatttacctgtaatcttaatctctggtgcacccaataacaacgatcacgctgctggtcatgtattgcatcatgctttaggtaaaaccgattatcattaccaattagaaatggcaaaaaatattaccgctgccgcagaagctatttatactcccgaagaagcacctgctaagatcgatcacgtaattaaaaccgctctccgtgagaaaaaacccgtatatttagaaatcgcttgcaatatcgcttctatgccttgtgcagctcctggacctgctagtgctttatttaacgatgaagcatctgatgaggctagtttaaatgccgctgttgaagaaactttgaaatttattgctaatcgtgataaagtagctgttttagttggttctaaactccgtgccgctggtgcagaagaagcggctgtaaaattcgcagatgccttaggaggtgctgttgccacaatggcagccgctaaaagttttttccccgaagaaaatcctcattacattggtacttcttggggtgaggtatcttaccctggtgtagaaaaaaccatgaaggaagctgatgcagtaattgcattagctcctgttttcaatgattactctaccactggttggactgatattccagaccccaaaaaattagttttagcagaacctcgctctgtagttgtgaatggtgttagatttcccagtgtacatctcaaagattatttaactcgtttagctcaaaaagtgagtaaaaagactggcgcactcgatttctttaaatctttaaatgctggtgaattaaagaaagcagctcctgctgatcccagtgctcctttagtgaatgccgaaatcgcaagacaagttgaagccttgttaactcctaacactaccgttattgccgagactggtgatagttggttcaatgctcaacgcatgaaattacccaatggtgctcgtgttgagtatgaaatgcaatggggtcacattggatggtctgttcctgctgcatttggatatgcagttggagcacctgagcgtagaaacattttaatggtaggtgatggttctttccaactcactgctcaagaagttgcacaaatggtacgtttaaaattgcctgttattatctttctcattaacaactatggttacaccattgaagttatgattcatgatggtccttataataacattaagaattgggattacgcaggtttaatggaggtatttaacggtaatggtggatacgacagtggagcaggtaaaggattaaaagctaaaacaggaggtgagttagctgaagcaattaaagtagctttagccaatacagatggtcctaccttaatcgaatgtttcattggacgtgaagattgtactgaagagttagttaaatggggaaagcgtgttgccgctgcaaattctcgtaaacctgtaaacaaactcttgtagttag

SEQ ID NO: 50 - DNA, 13604 bp, Cyanobacterium sp. ABICyano1
aatatttttcgtcagatacgcaaaccttacaaacataattaacaactgaaactattgatatgtctaggttttagctctatcacaggttggatctgtcgactttatatataaactcgaataaaattatcaatataaagtcaaactatatctatcctattttaactgctattggtaagtcccttaattagtgttggggtgaatagattttaaaagggcaaacccccctttatcctccctcgagaggggggagggcaaaaggcaaggggcaagggaaaaattaagaattaagaattaaaaactccgaacacctgtaggggcgaatagccattcgcttcccctcatccccccatctccccaacaccctaagcccctactcgttactcatttatttacatcatttatttacatcattaagaaaagtaacaaattttgacaagtagtcttttgacaggaaaaagcaaattctcgaagatgaaaacaatagaaaaaaattcaatcttacagtaacgatgaaaaaacttttaggcttaattatgaattcttataccgtgggtacttatttagccgaacgcttagtgcaaattggtttaaaacatcattttgccgtggctggggactataatttagtgttattggataacttattattaaataaaaacatggaacaagtgtattgttgtaatgaattaaattgtggtttttctgctgaaggttatgctagagctaaaggtgcagctgctgctgttgttacttattctgtgggtgctttatctgcttttgatgctattggtggtgcttatgccgaaaatttacccgtgattttaatttctggtgcccctaataataatgatcatgccgctggacatgttttacatcatgccttaggtaaaaccgattatcattatcaattagaaatggccaaaaatattactgctgctgccgaagctatttatactcctgaagaagcccctgccaaaattgatcatgtgattaaaaccgccttacgcgaaaaaaaacccgtgtatttagaaattgcctgtaatattgcttctatgccttgtgctgctcctgggcctgcttctgctttatttaatgatgaagcctctgatgaagctagtttaaatgctgccgtggaagaaaccttaaaatttattgccaatcgcgataaagttgccgtgttagttggttctaaattaagagctgctggtgctgaagaagctgctgttaaatttgctgatgctttaggtggtgcagttgctactatggctgctgccaaatctttttttcccgaagaaaatccccattatattggaactagttggggagaagtttcttatcctggtgtggaaaaaactatgaaagaagccgacgctgttattgctttagcccctgtgtttaatgattattctaccactggttggactgatattcccgatcccaaaaaattagttttagccgaacctcgttctgttgttgttaatggtgttcgctttccctctgtgcatttaaaagattatttaacccgcttagcccaaaaagtttctaaaaaaactggtgccttagatttttttaaatctttaaatgcgggtgaattaaaaaaagctgctcctgctgatccttctgctcctttagttaatgctgaaattgcccgtcaagttgaagccttattaacccctaatactaccgttattgccgaaactggtgattcttggtttaatgcccaacgcatgaaattacctaatggtgcccgtgttgaatatgaaatgcaatggggtcatattggttggtctgtacctgctgcttttggttatgctgttggtgctcctgaacgtcgtaatattttaatggtgggtgatggttcttttcaattaactgcccaagaagttgcccaaatggttcgcttaaaattacccgttattatttttttaataaataattatggttataccattgaagtgatgattcatgatgggccatataataatattaaaaattgggattatgcgggtttaatggaagtgtttaatggtaatggtggttatgattctggtgctggtaaaggtttaaaagccaaaactggtggtgaattagctgaagctattaaagttgccttagccaatactgatgggccaaccttaattgaatgttttattggtcgcgaagattgtaccgaagaattagttaaatggggtaaacgtgttgctgctgctaattctcgcaaacccgtgaataaattattgtaatttttggggatcaattcgagctcctccgcttaaaaaatttcatttttcgatcaaaaaagacaaattattactaattagctcatggcaataaataatcagtagtaatctgttttcacattttattgttaatttttattattgctaatatcaaccttttctacttctgcttaatattttatttatgctcaatgggaaaatctgaaataagattgagaacagtgttaccaatagaagtatttaaggtttaaagcataccttaaagataacatttttttttgaaaagagtcaaattatttttgaaaggctgatatttttgatatttactaatattttatttatttctttttcccttaaaataagagctaaatctgtttttattatcatttatcaagctctattaatacctcaactttttcaagaaaaaataataataatttttccctctattctcatgaccttttaggaaaattaattttagaaaaactattgacaaacccataaaaaatgagataagattatagattgtcactggtattttatactagaggcaaattatatttatatatacaaaaatgctgtataaaaaacatctcatatgattaaagcctatgctgccttagaagccaatggtaaattacaaccctttgaatatgatcctggtgctttaggtgccaatgaagtggaaattgaagtgcaatattgtggtgtgtgtcattctgatttatctatgattaataatgaatggggtatttctaattatcccttagttcctggtcatgaagttgttggtactgttgctgctatgggtgaaggtgttaatcatgtggaagtgggtgatttagttggtttaggttggcattctggttattgtatgacctgtcattcttgtttatctggttatcataatttatgtgccactgccgaatctactattgtgggtcattatggtggttttggtgatagagttcgtgctaaaggtgtttctgtggtgaaattacccaaaggtattgatttagcctctgctgggcctttattttgtggtggtattaccgttttttctcccatggtggaattatctttaaaacctaccgccaaagttgctgttattggtattggtggtttaggtcatttagccgttcaatttttaagagcctggggttgtgaagttactgcttttacctcttctgcccgtaaacaaaccgaagttttagaattaggtgcccatcatattttagattctaccaatcctgaagctattgcttctgccgaaggtaaatttgattatattatttctaccgtgaatttaaaattagattggaatttatatatcagtaccttagcccctcaaggtcattttcattttgttggtgtggtgttagaacccttggacttaaacttatttcccttattaatgggacaacgttctgtttctgcttctcctgttggttctcctgctactattgccactatgttagattttgccgtgcgtcatgatattaaacccgtggtggaacaattttcttttgatcaaattaatgaagccattgcccatttagaatctggtaaagcccattatcgcgtggtgttatctcattctaaaaattaataagattaacttctaaactgaaacaaatttgagggtaggcttcattgtctgcccttatttttttatttaggaaaagtgaacagactaaagagtgttggctctattgctttgagtatgtaaattaggcgttgctgaattaaggtatgatttttgaccccttctctcttctgcagttacctaggatttctggcgaaagggggatgtgctgcaaggcgattaagttgggtaacgccagggttttcccagtcacgacgttgtaaaacgacggccagtgagcgcgacgtaatacgactcactatagggcgaattggcggaaggccgtcaaggccgcatggcgcgcctacgtagacaattgtcgatgtaattattaactatcttattatagatgaggggagagggagaaattagttcggagagaacgctcgagcgctcgttccgcaaagcggtacggagttagttaggggctaatgggcattctcccgtacaggaaagagttagaagttattaattatcaacaattctcctttgcctagtgcatcgttacctttttaattaaaacataaggaaaactaataatcgtaataatttaacctcaaagtgtaaagaaatgtgaaattctgacttttataacgttaaagagggaaaaattagcagtttaaaatacctagagaatagtctggggtaagcatagagaattagattagttaagttaatcaaattcagaaaaaataataatcgtaaatagttaatctgggtgtatagaaaatgatccccttcatgataagatttaaactcgaaaagcaaaagccaaaaaactaacttccattaaaagaagttgttacatataacgctataaagaaaatttatatatttggaggataccaaccatgtctcatattcaacgtgaaactagttgttctcgtcctcgtttaaattctaatatggatgccgatttatatggttataaatgggctcgtgataatgttggtcaatctggtgctactatttatcgtttatatggtaaacctgatgctcctgaattattcttgaaacatggtaaaggttctgttgctaatgatgttactgatgaaatggttcgtttaaactggttgactgaatttatgcctttacctactattaaacattttattcgtactcccgatgatgcttggttattaactactgctattcctggtaaaactgcttttcaagttttagaagaatatcctgattctggtgaaaatattgttgatgctttagctgtttttttacgtcgtttacattctattcccgtttgtaattgtccttttaattctgatcgtgtttttcgtttagctcaagctcaatctcgtatgaataatggtttagttgatgcttctgattttgatgatgaacgtaatggttggcctgttgaacaagtttggaaagaaatgcacaaattgttacctttttctcctgattctgttgttactcatggtgatttttctttagataatttgatctttgatgaaggtaaattgattggttgtattgatgttggtcgtgttggtattgctgatcgttatcaagatttagctattttatggaattgtttaggtgaattttctccttctttacagaaacgtttatttcagaaatatggtattgataatcctgatatgaacaagttacaatttcatttaatgttggacgagttcttttaagaattaattcatgaccaaaatcccttaacgtgagttttcgttccactgagcgtcagaccccgtagaaaagatcaaaggatcttcttgagatcctttttttctgcgcgtaatctgctgctatttaaattacgtacacgtgttattactttgttaacgacaattgtcttaattaactgggcctcatgggccttccgctcactgcccgctttccagtcgggaaacctgtcgtgccagctctgcagatgacggtgaaaacctctgacacatgcagctcccggagacggtcacagcttgtctgtaagcggatgccgggagcagacaagcccgtcagggcgcgtcagcgggtgttggcgggtgtcggggcgcagccatgacccagtcacgtagcgatagcggagtgtatactggcttaactatgcggcatcagagcagattgtactgagagtgcaccatatgcggtgtgaaataccgcacagatgcgtaaggagaaaataccgcatcaggcgctcttccgcttcctcgctcactgactcgctgcgctcggtcgttcggctgcggcgagcggtatcagctcactcaaaggcggtaatacggttatccacagaatcaggggataacgcaggaaagaacatgtgagcaaaaggccagcaaaaggccaggaaccgtaaaaaggccgcgttgctggcgtttttccataggctccgcccccctgacgagcatcacaaaaatcgacgctcaagtcagaggtggcgaaacccgacaggactataaagataccaggcgtttccccctggaagctccctcgtgcgctctcctgttccgaccctgccgcttaccggatacctgtccgcctttctcccttcgggaagcgtggcgctttctcatagctcacgctgtaggtatctcagttcggtgtaggtcgttcgctccaagctgggctgtgtgcacgaaccccccgttcagcccgaccgctgcgccttatccggtaactatcgtcttgagtccaacccggtaagacacgacttatcgccactggcagcagccactggtaacaggattagcagagcgaggtatgtaggcggtgctacagagttcttgaagtggtggcctaactacggctacactagaaggacagtatttggtatctgcgctctgctgaagccagttaccttcggaaaaagagttggtagctcttgatccggcaaacaaaccaccgctggtagcggtggtttttttgtttgcaagcagcagattacgcgcagaaaaaaaggatctcaagaagatcctttgatcttttctactgcagaagcttgttagacaccctgtcatgtattttatattatttatttcaccatacggattaagtgaaacctaatgaaaatagtactttcggagctttaactttaatgaaggtatgtttttttatagacatcgatgtctggtttaacaataggaaaaagtagctaaaactcccatgaattaaagaaataacaaggtgtctaacaacctgttattaagaatgttagaaaagacttaacatttgtgttgagtttttatagacattggtgtctagacatacggtagataaggtttgctcaaaaataaaataaaaaaagattggactaaaaaacatttaatttagtacaatttaattagttattttttcgtctcaaattttgctttgttgagcagaaatttagataaaaaaatccccgtgatcagattacaatgtcgttcattgtacgatgtgtcgaaaaatctttacgacactctaaactgaccacacgggggaaaaagaaaactgaactaataacatcatgatactcggaaaacctagcaattctcaacccctaaacaaaagaaacttccaaaaccctgaccatataaaggagtggcaacaatcagcaatcagtcaagatttgatagcagaaaatcttgtatcggttgctaatggttttgatgtactatttatcggcaataaataccgaactaacacgggtgttctgtcacggcacatattaaactcctattctcatttagaagatggtggttcgtatggtagaacatttgacccatttaccaataaagaaatgcagtgggttcaatttaaaccgaatagaccaagaaaaggttctactggtaaggtaatcaaatatgaatcgccaaaaggtgaacctacaagagttctaatgccgtttgtgcctatgaaaatatggcaacggattagcgataagttcggagtaccgattaatccgaaaaaagatactcacttttgggaatgggtaaagaataatccatcgataccgattgccattacagaaggaaataaaaaagctaattgcctattatcctatggctatcctgctattgcctttgtaggcatttggaacggattagagaaaataaatgatttctcgaaggaaaagcagttaaaagaggatttgaaatggttgttatccaacggcaaccgaaatattaatatcatctttgaccaagaccagaaacaaaaaactgtaattaatgtaaacaaagctattttcgctttatcttctctaataagtagaaatggtcataaagttaatattgtgcaatggttgccgtcaaaaggtaaaggaatagatgattatttggtagctttaccttttgagaaaagagaaaatcatttagacaacttaattaaaattgcaccatcatttaatttttggtcaactaaatacttattcaagtgtcgtaaaccagatttaaccgtaaattgccgttatttgagcgatgcagtaaaagaattacctcaagaggatatagcattaatagcacctcacggcacgggtaaaacttcattagtagctactcacgttaagaatcggagttatcacggaaggaaaactatttcattggtgcatcttgaaagtttagccaaagctaatggcaacgcacttggattatattaccgaaccgaaaataatattgaaaagcaatatcttggatttagcttatgtgtagatagttgccgtgataagattaacggcattacaactgatattatttcaggtcaagattattgccttttcattgatgaaattgaccaagtaattccacacatccttaacagtgaaactgaagtaagtaagtatagatgcaccatcattgacactttttctgaactggtgagaaatgctgaacaggtcattattgctgatgctgatttatccgatgtgacgattgacctaatagaaaacatcagaggtaaaaaactatatgtaatcaagaatgaatatcagtatcagggaatgacttttaacgccgttggttcaccattagaaatgatggcaatgatgggaaaatcggtgtcagaaggcaagaaattatttattaacaccacatcccaaaaggcaaaaagtaagtacggcacaatcgctcttgagtcttatatttttggtctaaataaagaagcaaagatattaagaatagactctgaaaccactaaaaaccctgaacatccagcctataaaatcattgaccaagacttaaataatatcctcaaagattatgattatgtcattgcctcaccttgccttcaaacaggtgtcagtattaccttaaaagggcattttgaccagcaatttaacttttccagtggaaacattacacctcattgctttttacagcaaatgtggcggttgagggatgcagaaattgaaagattctattatgtgccgaactcatctaacctcaatctcattgggaataagtcaagttcaccatcagaccttctaaagagcaataacaagatggcaacggcaacggttaaccttttgggtagaatcgactccgaatattccctagagtatgaatcgcacggcatttggcttgagacgtgggcaaaattatcagcacggcataacagttcaatgcgttgttactctgaaattcttacctatctaattacgtctcaagggcataaattaaatatcaacattccctcacctcttgcagatattaagaagctaaatgatgaggtaagtagtaacagggaaaaggtaaaaaatgagagatactctcagaggttaaactcaccagatattaacgatgcagaagctaccatactcgaatctaaagagcaaaaaatcggattgactctcaatgagagatgcaccctagaaaagcataaagttaagaagcggtatgggaatgtaaagatggatattctcacctttgatgatgatggactataccccaaactcagactattttattacctcaccatcggtaaacctcatctcaaggctaatgacagaaaagctattgccaaaatgggcaatgacaataaaggcaagattctatcaaaagacttagttaataaaacttactccgctcgtgtgaaggtcttagagattcttaaactaactgactttatcgacaatcttagagatgaactcttaataactcccaataatccagctatcaccgattttaataatcttctgctaagagctaagaaggatttaagagtattaggagtcaacatcggaaaatatccaatggccaacattaatgccgtacttactctcattggtcacaaactttctgtaatgagagatgagttcggaaaagagaaaaggataaaagtagatggtaaatcataccgatgttatcaacttgaaacattaccagattttaccaatgatactcttgactactggttagaaaatgatagccaaaaagaagtaacagcaacagaaaattactccgaaaattttaacccttcaaatagctacaatccagacagtaagacactttcagagggtgcaaatttcctatatataaataaagaagaattgcatccaaataaattgcacctagaaataaaagaaggtgctgaactttttttattcggggtaaaggtgattgtgaaaggaatcttggacggggcagtaactatattctctatgggtcaagaatacgatttatccctcaatgaactagaggggatgttaacatcatgaactttacaagaatctttttaaagggcgatcgcaccatgttaaatgatggtacatttgttcagatatttgatatttaccatgaccacgcattgggagtgacccttgaccttaagacagaaaaaattatttccgatgatgttagggtaattactgtcaaagacttattgttcgatggcacttataaaggggtaaaatcttttatgcccgataatgcccgataatgcccgattgatgctacaaaatcccataatcataagcgataatcccctaatagcttgtaattcttgaaccgtagcgattttagagtattccaaaaagaagaaataaacaccgcaaaatgtcgtatttcacatatataaaccaaggttttttgccctaaaatctttatgtttgtagtgtgatgttgggtcaaaatggtcagaaaagttgcaaggtttttatggatgcttacgcgcgcgaggggtaagcatccccaaatagttactttatcctagtccatgcccatttattgccgtcccgttcggctttaaaaaagtgccaaaactcacaaggtgcaataaaaagttctgtacctttcgcaaccctagataatctttcaacagttactttttttcctattatctcggtacaaagtttggctagtttctcttttccctctttttcaatcaagccttcttgtatgcccaactcattgattaatctctctatttttaccattatttcccgttcaggtagtttatcccctaaatcttcatcggggggcaatgtagggcattctgaaggggctttttcttctgtctggacattatctaatattgaagtaaccaaactatcttcagttttttctattcctattaattcatattcggttactgtatccgtatcaatatccgaataactatctttatccgtattagctattcggttaagtttatccgttaactcagaaacaagactatatagcggttttagcttttcttctatcctgttatctaatacggataagtttatacggttatcattatccgtattagtatcattgggcttttttggtagttctaccccctcataaaccgcttttattcccaattccaacagactgataacagtatcctttataatgggttttttgctgatatggtgaacttttgccccttccatcattgcgatactttctatctcactcatcaacttatcgcttaagtgaatctcgtatctgtttaatcccttactggttttattcatatccgtttactttattcggttaacaattctattttatacgaataaaatattatacggttaactttatacgtttaactattttatctatacggataacagtaataagttattcgtattagttatacgtttacttttatccaaataaaattagtgcatttaaactaaaagaatgattttatcggagttgatagcattggattaacctaaagatgtttataagctatatctgataagtatttaaggttattttgttattctgtttattgacattatcagaataaaagaatagaatataattgttgagagataagaggtttaagtgattatggttaagaagttagttggttatgtcagggtcagtagtgaatcgcaagaggataacactagcttacagaatcagatagagagaattgaagcatattgtatggcttttggttatgagttggtaaaaatattcaaagaggttgccactggtacaaaagcagatattgaaacccgtcctatttttaatgaagctatagaatacttgaaacaggataatgctaatggaattattgccttgaagctagaccgaatcgcacggaatgctttagatgtattgcgtttggttcgtgaaaccttagaaccacaaaataaaatgttagtgttactagatattcaggtagatacttcgacaccttcaggaaaaatgattttaactgtaatgagtgccgttgctgaactcgaaagagacatgatctatgatcgcactcaggggggtagaaagactaaagcccaaaagggcgggtatgcctacgggaaacctaaatttggctataagactgaagaaaaggaactaaaagaagattcagcacaacaggaaactattaaactaattaagagacaccgtaggtcagggaaaagctaccagaaaatagctgattatctcaatgcccaaagtattcccactaaacaaggtaagaaatggagttctagcgtcgtctatcgaatctgtcaggaaaaagctggttaagtctgtttatagatatttagaatttattgaataaaaatagtatgaacaataaatatttatggactaaccacgctcggaaacgtttaactgaacgatgggaaataaaagaatcatgggttattgataccatcgaaaatcctgaacgttcagaatttattgttgatgagtcaggggaaaaatatcattactataaaagaatagctaagtttaagaatagagtgttagaagtgataacttctgccaactcaacacccacaagaataataaccttttactttaaccgtaacatgaggaaaaatttatgattgttacttacgataatgaagttgacgcaatttattttaagttaacggaaaataaaattgatagcaccgaacctcaaacagacaggattatcattgattacgatgaaagtaataatattgttggcattgaggtattagattttaattatcttgtcaagaaaggtttaaccgttgctgatttacctttttctgaagatgaaagattaacagcttctcaatattttaattttcctgttgctatctaatccagaaggggcaataatccccttctttcatcgagttagacttaatatcacaaaagtcattttcattttaccgtttcttttccacagcgtccgtacgcccctcgttaaatctcaaaaccgacaatttatgatgtttataaaaagttactcactttaataagtatttatactcattaaagggttattctttttttgtagcctgataggttgggaaggaatatttcagattatcagatttgttg

SEQ ID NO: 51 - DNA, 12763 bp, Cyanobacterium sp. ABICyano1
tcgacaattaataacttcttcctgtacgggcgaatggccatttgctcctaactaactccgtactgctttgcggaacgagcgtagcgaactctccgaattactaagccttcatccctgatagatgcaaaaaacgaattaaaattatgtgtaaaaagaaaatgtgtctttatttagtagtcaaagttacaaaatattaagaatcaaattaataatgtattgggcagttaagtatataagtctttaaatatttatttgtattcaatatattaaggaggatcagccttatgaattcttataccgtgggtacttatttagccgaacgcttagtgcaaattggtttaaaacatcattttgccgtggctggggactataatttagtgttattggataacttattattaaataaaaacatggaacaagtgtattgttgtaatgaattaaattgtggtttttctgctgaaggttatgctagagctaaaggtgcagctgctgctgttgttacttattctgtgggtgctttatctgcttttgatgctattggtggtgcttatgccgaaaatttacccgtgattttaatttctggtgcccctaataataatgatcatgccgctggacatgttttacatcatgccttaggtaaaaccgattatcattatcaattagaaatggccaaaaatattactgctgctgccgaagctatttatactcctgaagaagcccctgccaaaattgatcatgtgattaaaaccgccttacgcgaaaaaaaacccgtgtatttagaaattgcctgtaatattgcttctatgccttgtgctgctcctgggcctgcttctgctttatttaatgatgaagcctctgatgaagctagtttaaatgctgccgtggaagaaaccttaaaatttattgccaatcgcgataaagttgccgtgttagttggttctaaattaagagctgctggtgctgaagaagctgctgttaaatttgctgatgctttaggtggtgcagttgctactatggctgctgccaaatctttttttcccgaagaaaatccccattatattggaactagttggggagaagtttcttatcctggtgtggaaaaaactatgaaagaagccgacgctgttattgctttagcccctgtgtttaatgattattctaccactggttggactgatattcccgatcccaaaaaattagttttagccgaacctcgttctgttgttgttaatggtgttcgctttccctctgtgcatttaaaagattatttaacccgcttagcccaaaaagtttctaaaaaaactggtgccttagatttttttaaatctttaaatgcgggtgaattaaaaaaagctgctcctgctgatccttctgctcctttagttaatgctgaaattgcccgtcaagttgaagccttattaacccctaatactaccgttattgccgaaactggtgattcttggtttaatgcccaacgcatgaaattacctaatggtgcccgtgttgaatatgaaatgcaatggggtcatattggttggtctgtacctgctgcttttggttatgctgttggtgctcctgaacgtcgtaatattttaatggtgggtgatggttcttttcaattaactgcccaagaagttgcccaaatggttcgcttaaaattacccgttattatttttttaataaataattatggttataccattgaagtgatgattcatgatgggccatataataatattaaaaattgggattatgcgggtttaatggaagtgtttaatggtaatggtggttatgattctggtgctggtaaaggtttaaaagccaaaactggtggtgaattagctgaagctattaaagttgccttagccaatactgatgggccaaccttaattgaatgttttattggtcgcgaagattgtaccgaagaattagttaaatggggtaaacgtgttgctgctgctaattctcgcaaacccgtgaataaattattgtaatttttggggatcaattcgagctcagcaagtttcatcccgaccccctcagggtcgggatttttttattgtactagttgacataagtaaaggcatcccctgcgtgatataattaccttcagtttaaggaggtatacacatatgattaaagcctatgctgccttagaagccaatggtaaattacaaccctttgaatatgatcctggtgctttaggtgccaatgaagtggaaattgaagtgcaatattgtggtgtgtgtcattctgatttatctatgattaataatgaatggggtatttctaattatcccttagttcctggtcatgaagttgttggtactgttgctgctatgggtgaaggtgttaatcatgtggaagtgggtgatttagttggtttaggttggcattctggttattgtatgacctgtcattcttgtttatctggttatcataatttatgtgccactgccgaatctactattgtgggtcattatggtggttttggtgatagagttcgtgctaaaggtgtttctgtggtgaaattacccaaaggtattgatttagcctctgctgggcctttattttgtggtggtattaccgttttttctcccatggtggaattatctttaaaacctaccgccaaagttgctgttattggtattggtggtttaggtcatttagccgttcaatttttaagagcctggggttgtgaagttactgcttttacctcttctgcccgtaaacaaaccgaagttttagaattaggtgcccatcatattttagattctaccaatcctgaagctattgcttctgccgaaggtaaatttgattatattatttctaccgtgaatttaaaattagattggaatttatatatcagtaccttagcccctcaaggtcattttcattttgttggtgtggtgttagaacccttggacttaaacttatttcccttattaatgggacaacgttctgtttctgcttctcctgttggttctcctgctactattgccactatgttagattttgccgtgcgtcatgatattaaacccgtggtggaacaattttcttttgatcaaattaatgaagccattgcccatttagaatctggtaaagcccattatcgcgtggtgttatctcattctaaaaattaataagattaacttctaaactgaaacaaatttgagggtaggcttcattgtctgcccttatttttttatttaggaaaagtgaacagactaaagagtgttggctctattgctttgagtatgtaaattaggcgttgctgaattaaggtatgatttttgaccccttctctcttctgcaggatcatcttgctgaaaaactcgagcgctcgttccgcaaagcggtacggagttagttaggggctaatgggcattctcccgtacaggaaagagttagaagttattaattatcaacaattctcctttgcctagtgcatcgttacctttttaattaaaacataaggaaaactaataatcgtaataatttaacctcaaagtgtaaagaaatgtgaaattctgacttttataacgttaaagagggaaaaattagcagtttaaaatacctagagaatagtctggggtaagcatagagaattagattagttaagttaatcaaattcagaaaaaataataatcgtaaatagttaatctgggtgtatagaaaatgatccccttcatgataagatttaaactcgaaaagcaaaagccaaaaaactaacttccattaaaagaagttgttacatataacgctataaagaaaatttatatatttggaggataccaaccatgtctcatattcaacgtgaaactagttgttctcgccctcgtttaaattctaatatggatgccgatttatatggttataaatgggctcgtgataatgttggtcaatctggtgctactatttatcgtttatatggtaaacctgatgctcctgaattattcttgaaacatggtaaaggttctgttgctaatgatgttactgatgaaatggttcgtttaaactggttgactgaatttatgcctttacctactattaaacattttattcgtactcccgatgatgcttggttattaactactgctattcctggtaaaactgcttttcaagttttagaagaatatcctgattctggtgaaaatattgttgatgctttagctgtttttttacgtcgtttacattctattcccgtttgtaattgtccttttaattctgatcgtgtttttcgtttagctcaagctcaatctcgtatgaataatggtttagttgatgcttctgattttgatgatgaacgtaatggttggcctgttgaacaagtttggaaagaaatgcacaaattgttacctttttctcctgattctgttgttactcatggtgatttttctttagataatttgatctttgatgaaggtaaattgattggttgtattgatgttggtcgtgttggtattgctgatcgttatcaagatttagctattttatggaattgtttaggtgaattttctccttctttacagaaacgtttatttcagaaatatggtattgataatcctgatatgaacaagttacaatttcatttaatgttggacgagttcttttaagaattaattcatgaccaaaatcccttaacgtgagttttcgttccactgagcgtcagaccccgtagaaaagatcaaaggatcttcttgagatcctttttttctgcgcgtaatctgctgctatttaaattacgtacacgtgttattactttgttaacgacaattgtcttaattaactgggcctcatgggccttccgctcactgcccgctttccagtcgggaaacctgtcgtgccagctctgcagatgacggtgaaaacctctgacacatgcagctcccggagacggtcacagcttgtctgtaagcggatgccgggagcagacaagcccgtcagggcgcgtcagcgggtgttggcgggtgtcggggcgcagccatgacccagtcacgtagcgatagcggagtgtatactggcttaactatgcggcatcagagcagattgtactgagagtgcaccatatgcggtgtgaaataccgcacagatgcgtaaggagaaaataccgcatcaggcgctcttccgcttcctcgctcactgactcgctgcgctcggtcgttcggctgcggcgagcggtatcagctcactcaaaggcggtaatacggttatccacagaatcaggggataacgcaggaaagaacatgtgagcaaaaggccagcaaaaggccaggaaccgtaaaaaggccgcgttgctggcgtttttccataggctccgcccccctgacgagcatcacaaaaatcgacgctcaagtcagaggtggcgaaacccgacaggactataaagataccaggcgtttccccctggaagctccctcgtgcgctctcctgttccgaccctgccgcttaccggatacctgtccgcctttctcccttcgggaagcgtggcgctttctcatagctcacgctgtaggtatctcagttcggtgtaggtcgttcgctccaagctgggctgtgtgcacgaaccccccgttcagcccgaccgctgcgccttatccggtaactatcgtcttgagtccaacccggtaagacacgacttatcgccactggcagcagccactggtaacaggattagcagagcgaggtatgtaggcggtgctacagagttcttgaagtggtggcctaactacggctacactagaaggacagtatttggtatctgcgctctgctgaagccagttaccttcggaaaaagagttggtagctcttgatccggcaaacaaaccaccgctggtagcggtggtttttttgtttgcaagcagcagattacgcgcagaaaaaaaggatctcaagaagatcctttgatcttttctactgcagaagcttgttagacaccctgtcatgtattttatattatttatttcaccatacggattaagtgaaacctaatgaaaatagtactttcggagctttaactttaatgaaggtatgtttttttatagacatcgatgtctggtttaacaataggaaaaagtagctaaaactcccatgaattaaagaaataacaaggtgtctaacaacctgttattaagaatgttagaaaagacttaacatttgtgttgagtttttatagacattggtgtctagacatacggtagataaggtttgctcaaaaataaaataaaaaaagattggactaaaaaacatttaatttagtacaatttaattagttattttttcgtctcaaattttgctttgttgagcagaaatttagataaaaaaatccccgtgatcagattacaatgtcgttcattgtacgatgtgtcgaaaaatctttacgacactctaaactgaccacacgggggaaaaagaaaactgaactaataacatcatgatactcggaaaacctagcaattctcaacccctaaacaaaagaaacttccaaaaccctgaccatataaaggagtggcaacaatcagcaatcagtcaagatttgatagcagaaaatcttgtatcggttgctaatggttttgatgtactatttatcggcaataaataccgaactaacacgggtgttctgtcacggcacatattaaactcctattctcatttagaagatggtggttcgtatggtagaacatttgacccatttaccaataaagaaatgcagtgggttcaatttaaaccgaatagaccaagaaaaggttctactggtaaggtaatcaaatatgaatcgccaaaaggtgaacctacaagagttctaatgccgtttgtgcctatgaaaatatggcaacggattagcgataagttcggagtaccgattaatccgaaaaaagatactcacttttgggaatgggtaaagaataatccatcgataccgattgccattacagaaggaaataaaaaagctaattgcctattatcctatggctatcctgctattgcctttgtaggcatttggaacggattagagaaaataaatgatttctcgaaggaaaagcagttaaaagaggatttgaaatggttgttatccaacggcaaccgaaatattaatatcatctttgaccaagaccagaaacaaaaaactgtaattaatgtaaacaaagctattttcgctttatcttctctaataagtagaaatggtcataaagttaatattgtgcaatggttgccgtcaaaaggtaaaggaatagatgattatttggtagctttaccttttgagaaaagagaaaatcatttagacaacttaattaaaattgcaccatcatttaatttttggtcaactaaatacttattcaagtgtcgtaaaccagatttaaccgtaaattgccgttatttgagcgatgcagtaaaagaattacctcaagaggatatagcattaatagcacctcacggcacgggtaaaacttcattagtagctactcacgttaagaatcggagttatcacggaaggaaaactatttcattggtgcatcttgaaagtttagccaaagctaatggcaacgcacttggattatattaccgaaccgaaaataatattgaaaagcaatatcttggatttagcttatgtgtagatagttgccgtgataagattaacggcattacaactgatattatttcaggtcaagattattgccttttcattgatgaaattgaccaagtaattccacacatccttaacagtgaaactgaagtaagtaagtatagatgcaccatcattgacactttttctgaactggtgagaaatgctgaacaggtcattattgctgatgctgatttatccgatgtgacgattgacctaatagaaaacatcagaggtaaaaaactatatgtaatcaagaatgaatatcagtatcagggaatgacttttaacgccgttggttcaccattagaaatgatggcaatgatgggaaaatcggtgtcagaaggcaagaaattatttattaacaccacatcccaaaaggcaaaaagtaagtacggcacaatcgctcttgagtcttatatttttggtctaaataaagaagcaaagatattaagaatagactctgaaaccactaaaaaccctgaacatccagcctataaaatcattgaccaagacttaaataatatcctcaaagattatgattatgtcattgcctcaccttgccttcaaacaggtgtcagtattaccttaaaagggcattttgaccagcaatttaacttttccagtggaaacattacacctcattgctttttacagcaaatgtggcggttgagggatgcagaaattgaaagattctattatgtgccgaactcatctaacctcaatctcattgggaataagtcaagttcaccatcagaccttctaaagagcaataacaagatggcaacggcaacggttaaccttttgggtagaatcgactccgaatattccctagagtatgaatcgcacggcatttggcttgagacgtgggcaaaattatcagcacggcataacagttcaatgcgttgttactctgaaattcttacctatctaattacgtctcaagggcataaattaaatatcaacattccctcacctcttgcagatattaagaagctaaatgatgaggtaagtagtaacagggaaaaggtaaaaaatgagagatactctcagaggttaaactcaccagatattaacgatgcagaagctaccatactcgaatctaaagagcaaaaaatcggattgactctcaatgagagatgcaccctagaaaagcataaagttaagaagcggtatgggaatgtaaagatggatattctcacctttgatgatgatggactataccccaaactcagactattttattacctcaccatcggtaaacctcatctcaaggctaatgacagaaaagctattgccaaaatgggcaatgacaataaaggcaagattctatcaaaagacttagttaataaaacttactccgctcgtgtgaaggtcttagagattcttaaactaactgactttatcgacaatcttagagatgaactcttaataactcccaataatccagctatcaccgattttaataatcttctgctaagagctaagaaggatttaagagtattaggagtcaacatcggaaaatatccaatggccaacattaatgccgtacttactctcattggtcacaaactttctgtaatgagagatgagttcggaaaagagaaaaggataaaagtagatggtaaatcataccgatgttatcaacttgaaacattaccagattttaccaatgatactcttgactactggttagaaaatgatagccaaaaagaagtaacagcaacagaaaattactccgaaaattttaacccttcaaatagctacaatccagacagtaagacactttcagagggtgcaaatttcctatatataaataaagaagaattgcatccaaataaattgcacctagaaataaaagaaggtgctgaactttttttattcggggtaaaggtgattgtgaaaggaatcttggacggggcagtaactatattctctatgggtcaagaatacgatttatccctcaatgaactagaggggatgttaacatcatgaactttacaagaatctttttaaagggcgatcgcaccatgttaaatgatggtacatttgttcagatatttgatatttaccatgaccacgcattgggagtgacccttgaccttaagacagaaaaaattatttccgatgatgttagggtaattactgtcaaagacttattgttcgatggcacttataaaggggtaaaatcttttatgcccgataatgcccgataatgcccgattgatgctacaaaatcccataatcataagcgataatcccctaatagcttgtaattcttgaaccgtagcgattttagagtattccaaaaagaagaaataaacaccgcaaaatgtcgtatttcacatatataaaccaaggttttttgccctaaaatctttatgtttgtagtgtgatgttgggtcaaaatggtcagaaaagttgcaaggtttttatggatgcttacgcgcgcgaggggtaagcatccccaaatagttactttatcctagtccatgcccatttattgccgtcccgttcggctttaaaaaagtgccaaaactcacaaggtgcaataaaaagttctgtacctttcgcaaccctagataatctttcaacagttactttttttcctattatctcggtacaaagtttggctagtttctcttttccctctttttcaatcaagccttcttgtatgcccaactcattgattaatctctctatttttaccattatttcccgttcaggtagtttatcccctaaatcttcatcggggggcaatgtagggcattctgaaggggctttttcttctgtctggacattatctaatattgaagtaaccaaactatcttcagttttttctattcctattaattcatattcggttactgtatccgtatcaatatccgaataactatctttatccgtattagctattcggttaagtttatccgttaactcagaaacaagactatatagcggttttagcttttcttctatcctgttatctaatacggataagtttatacggttatcattatccgtattagtatcattgggcttttttggtagttctaccccctcataaaccgcttttattcccaattccaacagactgataacagtatcctttataatgggttttttgctgatatggtgaacttttgccccttccatcattgcgatactttctatctcactcatcaacttatcgcttaagtgaatctcgtatctgtttaatcccttactggttttattcatatccgtttactttattcggttaacaattctattttatacgaataaaatattatacggttaactttatacgtttaactattttatctatacggataacagtaataagttattcgtattagttatacgtttacttttatccaaataaaattagtgcatttaaactaaaagaatgattttatcggagttgatagcattggattaacctaaagatgtttataagctatatctgataagtatttaaggttattttgttattctgtttattgacattatcagaataaaagaatagaatataattgttgagagataagaggtttaagtgattatggttaagaagttagttggttatgtcagggtcagtagtgaatcgcaagaggataacactagcttacagaatcagatagagagaattgaagcatattgtatggcttttggttatgagttggtaaaaatattcaaagaggttgccactggtacaaaagcagatattgaaacccgtcctatttttaatgaagctatagaatacttgaaacaggataatgctaatggaattattgccttgaagctagaccgaatcgcacggaatgctttagatgtattgcgtttggttcgtgaaaccttagaaccacaaaataaaatgttagtgttactagatattcaggtagatacttcgacaccttcaggaaaaatgattttaactgtaatgagtgccgttgctgaactcgaaagagacatgatctatgatcgcactcaggggggtagaaagactaaagcccaaaagggcgggtatgcctacgggaaacctaaatttggctataagactgaagaaaaggaactaaaagaagattcagcacaacaggaaactattaaactaattaagagacaccgtaggtcagggaaaagctaccagaaaatagctgattatctcaatgcccaaagtattcccactaaacaaggtaagaaatggagttctagcgtcgtctatcgaatctgtcaggaaaaagctggttaagtctgtttatagatatttagaatttattgaataaaaatagtatgaacaataaatatttatggactaaccacgctcggaaacgtttaactgaacgatgggaaataaaagaatcatgggttattgataccatcgaaaatcctgaacgttcagaatttattgttgatgagtcaggggaaaaatatcattactataaaagaatagctaagtttaagaatagagtgttagaagtgataacttctgccaactcaacacccacaagaataataaccttttactttaaccgtaacatgaggaaaaatttatgattgttacttacgataatgaagttgacgcaatttattttaagttaacggaaaataaaattgatagcaccgaacctcaaacagacaggattatcattgattacgatgaaagtaataatattgttggcattgaggtattagattttaattatcttgtcaagaaaggtttaaccgttgctgatttacctttttctgaagatgaaagattaacagcttctcaatattttaattttcctgttgctatctaatccagaaggggcaataatccccttctttcatcgagttagacttaatatcacaaaagtcattttcattttaccgtttcttttccacagcgtccgtacgcccctcgttaaatctcaaaaccgacaatttatgatgtttataaaaagttactcactttaataagtatttatactcattaaagggttattctttttttgtagcctgataggttgggaaggaatatttcagattatcagatttgttgaatatttttcgtcagatacgcaaaccttacaaacataattaacaactgaaactattgatatgtctaggttttagctctatcacaggttggatctg

SEQ ID NO: 52 - DNA, 12762 bp, Cyanobacterium sp. ABICyano1
tcgacaattaataacttcttcctgtacgggcgaatggccatttgctcctaactaactccgtactgctttgcggaacgagcgtagcgaactctccgaattactaagccttcatccctgatagatgcaaaaaacgcattaaaattatgcgtaaaaagcatatttgtctttatttagtaatcaaagttacaaattattaagaatcaaattaataatatattgggcagttaagtatataagtctttaaatatttatttgtattcaatatattaaccgaggacaaattatgaattcttataccgtgggtacttatttagccgaacgcttagtgcaaattggtttaaaacatcattttgccgtggctggggactataatttagtgttattggataacttattattaaataaaaacatggaacaagtgtattgttgtaatgaattaaattgtggtttttctgctgaaggttatgctagagctaaaggtgcagctgctgctgttgttacttattctgtgggtgctttatctgcttttgatgctattggtggtgcttatgccgaaaatttacccgtgattttaatttctggtgcccctaataataatgatcatgccgctggacatgttttacatcatgccttaggtaaaaccgattatcattatcaattagaaatggccaaaaatattactgctgctgccgaagctatttatactcctgaagaagcccctgccaaaattgatcatgtgattaaaaccgccttacgcgaaaaaaaacccgtgtatttagaaattgcctgtaatattgcttctatgccttgtgctgctcctgggcctgcttctgctttatttaatgatgaagcctctgatgaagctagtttaaatgctgccgtggaagaaaccttaaaatttattgccaatcgcgataaagttgccgtgttagttggttctaaattaagagctgctggtgctgaagaagctgctgttaaatttgctgatgctttaggtggtgcagttgctactatggctgctgccaaatctttttttcccgaagaaaatccccattatattggaactagttggggagaagtttcttatcctggtgtggaaaaaactatgaaagaagccgacgctgttattgctttagcccctgtgtttaatgattattctaccactggttggactgatattcccgatcccaaaaaattagttttagccgaacctcgttctgttgttgttaatggtgttcgctttccctctgtgcatttaaaagattatttaacccgcttagcccaaaaagtttctaaaaaaactggtgccttagatttttttaaatctttaaatgcgggtgaattaaaaaaagctgctcctgctgatccttctgctcctttagttaatgctgaaattgcccgtcaagttgaagccttattaacccctaatactaccgttattgccgaaactggtgattcttggtttaatgcccaacgcatgaaattacctaatggtgcccgtgttgaatatgaaatgcaatggggtcatattggttggtctgtacctgctgcttttggttatgctgttggtgctcctgaacgtcgtaatattttaatggtgggtgatggttcttttcaattaactgcccaagaagttgcccaaatggttcgcttaaaattacccgttattatttttttaataaataattatggttataccattgaagtgatgattcatgatgggccatataataatattaaaaattgggattatgcgggtttaatggaagtgtttaatggtaatggtggttatgattctggtgctggtaaaggtttaaaagccaaaactggtggtgaattagctgaagctattaaagttgccttagccaatactgatgggccaaccttaattgaatgttttattggtcgcgaagattgtaccgaagaattagttaaatggggtaaacgtgttgctgctgctaattctcgcaaacccgtgaataaattattgtaatttttggggatcaattcgagctcagcaagtttcatcccgaccccctcagggtcgggatttttttattgtactagttgacataagtaaaggcatcccctgcgtgatataattaccttcagtttaaggaggtatacacatatgattaaagcctatgctgccttagaagccaatggtaaattacaaccctttgaatatgatcctggtgctttaggtgccaatgaagtggaaattgaagtgcaatattgtggtgtgtgtcattctgatttatctatgattaataatgaatggggtatttctaattatcccttagttcctggtcatgaagttgttggtactgttgctgctatgggtgaaggtgttaatcatgtggaagtgggtgatttagttggtttaggttggcattctggttattgtatgacctgtcattcttgtttatctggttatcataatttatgtgccactgccgaatctactattgtgggtcattatggtggttttggtgatagagttcgtgctaaaggtgtttctgtggtgaaattacccaaaggtattgatttagcctctgctgggcctttattttgtggtggtattaccgttttttctcccatggtggaattatctttaaaacctaccgccaaagttgctgttattggtattggtggtttaggtcatttagccgttcaatttttaagagcctggggttgtgaagttactgcttttacctcttctgcccgtaaacaaaccgaagttttagaattaggtgcccatcatattttagattctaccaatcctgaagctattgcttctgccgaaggtaaatttgattatattatttctaccgtgaatttaaaattagattggaatttatatatcagtaccttagcccctcaaggtcattttcattttgttggtgtggtgttagaacccttggacttaaacttatttcccttattaatgggacaacgttctgtttctgcttctcctgttggttctcctgctactattgccactatgttagattttgccgtgcgtcatgatattaaacccgtggtggaacaattttcttttgatcaaattaatgaagccattgcccatttagaatctggtaaagcccattatcgcgtggtgttatctcattctaaaaattaataagattaacttctaaactgaaacaaatttgagggtaggcttcattgtctgcccttatttttttatttaggaaaagtgaacagactaaagagtgttggctctattgctttgagtatgtaaattaggcgttgctgaattaaggtatgatttttgaccccttctctcttctgcaggatcatcttgctgaaaaactcgagcgctcgttccgcaaagcggtacggagttagttaggggctaatgggcattctcccgtacaggaaagagttagaagttattaattatcaacaattctcctttgcctagtgcatcgttacctttttaattaaaacataaggaaaactaataatcgtaataatttaacctcaaagtgtaaagaaatgtgaaattctgacttttataacgttaaagagggaaaaattagcagtttaaaatacctagagaatagtctggggtaagcatagagaattagattagttaagttaatcaaattcagaaaaaataataatcgtaaatagttaatctgggtgtatagaaaatgatccccttcatgataagatttaaactcgaaaagcaaaagccaaaaaactaacttccattaaaagaagttgttacatataacgctataaagaaaatttatatatttggaggataccaaccatgtctcatattcaacgtgaaactagttgttctcgccctcgtttaaattctaatatggatgccgatttatatggttataaatgggctcgtgataatgttggtcaatctggtgctactatttatcgtttatatggtaaacctgatgctcctgaattattcttgaaacatggtaaaggttctgttgctaatgatgttactgatgaaatggttcgtttaaactggttgactgaatttatgcctttacctactattaaacattttattcgtactcccgatgatgcttggttattaactactgctattcctggtaaaactgcttttcaagttttagaagaatatcctgattctggtgaaaatattgttgatgctttagctgtttttttacgtcgtttacattctattcccgtttgtaattgtccttttaattctgatcgtgtttttcgtttagctcaagctcaatctcgtatgaataatggtttagttgatgcttctgattttgatgatgaacgtaatggttggcctgttgaacaagtttggaaagaaatgcacaaattgttacctttttctcctgattctgttgttactcatggtgatttttctttagataatttgatctttgatgaaggtaaattgattggttgtattgatgttggtcgtgttggtattgctgatcgttatcaagatttagctattttatggaattgtttaggtgaattttctccttctttacagaaacgtttatttcagaaatatggtattgataatcctgatatgaacaagttacaatttcatttaatgttggacgagttcttttaagaattaattcatgaccaaaatcccttaacgtgagttttcgttccactgagcgtcagaccccgtagaaaagatcaaaggatcttcttgagatcctttttttctgcgcgtaatctgctgctatttaaattacgtacacgtgttattactttgttaacgacaattgtcttaattaactgggcctcatgggccttccgctcactgcccgctttccagtcgggaaacctgtcgtgccagctctgcagatgacggtgaaaacctctgacacatgcagctcccggagacggtcacagcttgtctgtaagcggatgccgggagcagacaagcccgtcagggcgcgtcagcgggtgttggcgggtgtcggggcgcagccatgacccagtcacgtagcgatagcggagtgtatactggcttaactatgcggcatcagagcagattgtactgagagtgcaccatatgcggtgtgaaataccgcacagatgcgtaaggagaaaataccgcatcaggcgctcttccgcttcctcgctcactgactcgctgcgctcggtcgttcggctgcggcgagcggtatcagctcactcaaaggcggtaatacggttatccacagaatcaggggataacgcaggaaagaacatgtgagcaaaaggccagcaaaaggccaggaaccgtaaaaaggccgcgttgctggcgtttttccataggctccgcccccctgacgagcatcacaaaaatcgacgctcaagtcagaggtggcgaaacccgacaggactataaagataccaggcgtttccccctggaagctccctcgtgcgctctcctgttccgaccctgccgcttaccggatacctgtccgcctttctcccttcgggaagcgtggcgctttctcatagctcacgctgtaggtatctcagttcggtgtaggtcgttcgctccaagctgggctgtgtgcacgaaccccccgttcagcccgaccgctgcgccttatccggtaactatcgtcttgagtccaacccggtaagacacgacttatcgccactggcagcagccactggtaacaggattagcagagcgaggtatgtaggcggtgctacagagttcttgaagtggtggcctaactacggctacactagaaggacagtatttggtatctgcgctctgctgaagccagttaccttcggaaaaagagttggtagctcttgatccggcaaacaaaccaccgctggtagcggtggtttttttgtttgcaagcagcagattacgcgcagaaaaaaaggatctcaagaagatcctttgatcttttctactgcagaagcttgttagacaccctgtcatgtattttatattatttatttcaccatacggattaagtgaaacctaatgaaaatagtactttcggagctttaactttaatgaaggtatgtttttttatagacatcgatgtctggtttaacaataggaaaaagtagctaaaactcccatgaattaaagaaataacaaggtgtctaacaacctgttattaagaatgttagaaaagacttaacatttgtgttgagtttttatagacattggtgtctagacatacggtagataaggtttgctcaaaaataaaataaaaaaagattggactaaaaaacatttaatttagtacaatttaattagttattttttcgtctcaaattttgctttgttgagcagaaatttagataaaaaaatccccgtgatcagattacaatgtcgttcattgtacgatgtgtcgaaaaatctttacgacactctaaactgaccacacgggggaaaaagaaaactgaactaataacatcatgatactcggaaaacctagcaattctcaacccctaaacaaaagaaacttccaaaaccctgaccatataaaggagtggcaacaatcagcaatcagtcaagatttgatagcagaaaatcttgtatcggttgctaatggttttgatgtactatttatcggcaataaataccgaactaacacgggtgttctgtcacggcacatattaaactcctattctcatttagaagatggtggttcgtatggtagaacatttgacccatttaccaataaagaaatgcagtgggttcaatttaaaccgaatagaccaagaaaaggttctactggtaaggtaatcaaatatgaatcgccaaaaggtgaacctacaagagttctaatgccgtttgtgcctatgaaaatatggcaacggattagcgataagttcggagtaccgattaatccgaaaaaagatactcacttttgggaatgggtaaagaataatccatcgataccgattgccattacagaaggaaataaaaaagctaattgcctattatcctatggctatcctgctattgcctttgtaggcatttggaacggattagagaaaataaatgatttctcgaaggaaaagcagttaaaagaggatttgaaatggttgttatccaacggcaaccgaaatattaatatcatctttgaccaagaccagaaacaaaaaactgtaattaatgtaaacaaagctattttcgctttatcttctctaataagtagaaatggtcataaagttaatattgtgcaatggttgccgtcaaaaggtaaaggaatagatgattatttggtagctttaccttttgagaaaagagaaaatcatttagacaacttaattaaaattgcaccatcatttaatttttggtcaactaaatacttattcaagtgtcgtaaaccagatttaaccgtaaattgccgttatttgagcgatgcagtaaaagaattacctcaagaggatatagcattaatagcacctcacggcacgggtaaaacttcattagtagctactcacgttaagaatcggagttatcacggaaggaaaactatttcattggtgcatcttgaaagtttagccaaagctaatggcaacgcacttggattatattaccgaaccgaaaataatattgaaaagcaatatcttggatttagcttatgtgtagatagttgccgtgataagattaacggcattacaactgatattatttcaggtcaagattattgccttttcattgatgaaattgaccaagtaattccacacatccttaacagtgaaactgaagtaagtaagtatagatgcaccatcattgacactttttctgaactggtgagaaatgctgaacaggtcattattgctgatgctgatttatccgatgtgacgattgacctaatagaaaacatcagaggtaaaaaactatatgtaatcaagaatgaatatcagtatcagggaatgacttttaacgccgttggttcaccattagaaatgatggcaatgatgggaaaatcggtgtcagaaggcaagaaattatttattaacaccacatcccaaaaggcaaaaagtaagtacggcacaatcgctcttgagtcttatatttttggtctaaataaagaagcaaagatattaagaatagactctgaaaccactaaaaaccctgaacatccagcctataaaatcattgaccaagacttaaataatatcctcaaagattatgattatgtcattgcctcaccttgccttcaaacaggtgtcagtattaccttaaaagggcattttgaccagcaatttaacttttccagtggaaacattacacctcattgctttttacagcaaatgtggcggttgagggatgcagaaattgaaagattctattatgtgccgaactcatctaacctcaatctcattgggaataagtcaagttcaccatcagaccttctaaagagcaataacaagatggcaacggcaacggttaaccttttgggtagaatcgactccgaatattccctagagtatgaatcgcacggcatttggcttgagacgtgggcaaaattatcagcacggcataacagttcaatgcgttgttactctgaaattcttacctatctaattacgtctcaagggcataaattaaatatcaacattccctcacctcttgcagatattaagaagctaaatgatgaggtaagtagtaacagggaaaaggtaaaaaatgagagatactctcagaggttaaactcaccagatattaacgatgcagaagctaccatactcgaatctaaagagcaaaaaatcggattgactctcaatgagagatgcaccctagaaaagcataaagttaagaagcggtatgggaatgtaaagatggatattctcacctttgatgatgatggactataccccaaactcagactattttattacctcaccatcggtaaacctcatctcaaggctaatgacagaaaagctattgccaaaatgggcaatgacaataaaggcaagattctatcaaaagacttagttaataaaacttactccgctcgtgtgaaggtcttagagattcttaaactaactgactttatcgacaatcttagagatgaactcttaataactcccaataatccagctatcaccgattttaataatcttctgctaagagctaagaaggatttaagagtattaggagtcaacatcggaaaatatccaatggccaacattaatgccgtacttactctcattggtcacaaactttctgtaatgagagatgagttcggaaaagagaaaaggataaaagtagatggtaaatcataccgatgttatcaacttgaaacattaccagattttaccaatgatactcttgactactggttagaaaatgatagccaaaaagaagtaacagcaacagaaaattactccgaaaattttaacccttcaaatagctacaatccagacagtaagacactttcagagggtgcaaatttcctatatataaataaagaagaattgcatccaaataaattgcacctagaaataaaagaaggtgctgaactttttttattcggggtaaaggtgattgtgaaaggaatcttggacggggcagtaactatattctctatgggtcaagaatacgatttatccctcaatgaactagaggggatgttaacatcatgaactttacaagaatctttttaaagggcgatcgcaccatgttaaatgatggtacatttgttcagatatttgatatttaccatgaccacgcattgggagtgacccttgaccttaagacagaaaaaattatttccgatgatgttagggtaattactgtcaaagacttattgttcgatggcacttataaaggggtaaaatcttttatgcccgataatgcccgataatgcccgattgatgctacaaaatcccataatcataagcgataatcccctaatagcttgtaattcttgaaccgtagcgattttagagtattccaaaaagaagaaataaacaccgcaaaatgtcgtatttcacatatataaaccaaggttttttgccctaaaatctttatgtttgtagtgtgatgttgggtcaaaatggtcagaaaagttgcaaggtttttatggatgcttacgcgcgcgaggggtaagcatccccaaatagttactttatcctagtccatgcccatttattgccgtcccgttcggctttaaaaaagtgccaaaactcacaaggtgcaataaaaagttctgtacctttcgcaaccctagataatctttcaacagttactttttttcctattatctcggtacaaagtttggctagtttctcttttccctctttttcaatcaagccttcttgtatgcccaactcattgattaatctctctatttttaccattatttcccgttcaggtagtttatcccctaaatcttcatcggggggcaatgtagggcattctgaaggggctttttcttctgtctggacattatctaatattgaagtaaccaaactatcttcagttttttctattcctattaattcatattcggttactgtatccgtatcaatatccgaataactatctttatccgtattagctattcggttaagtttatccgttaactcagaaacaagactatatagcggttttagcttttcttctatcctgttatctaatacggataagtttatacggttatcattatccgtattagtatcattgggcttttttggtagttctaccccctcataaaccgcttttattcccaattccaacagactgataacagtatcctttataatgggttttttgctgatatggtgaacttttgccccttccatcattgcgatactttctatctcactcatcaacttatcgcttaagtgaatctcgtatctgtttaatcccttactggttttattcatatccgtttactttattcggttaacaattctattttatacgaataaaatattatacggttaactttatacgtttaactattttatctatacggataacagtaataagttattcgtattagttatacgtttacttttatccaaataaaattagtgcatttaaactaaaagaatgattttatcggagttgatagcattggattaacctaaagatgtttataagctatatctgataagtatttaaggttattttgttattctgtttattgacattatcagaataaaagaatagaatataattgttgagagataagaggtttaagtgattatggttaagaagttagttggttatgtcagggtcagtagtgaatcgcaagaggataacactagcttacagaatcagatagagagaattgaagcatattgtatggcttttggttatgagttggtaaaaatattcaaagaggttgccactggtacaaaagcagatattgaaacccgtcctatttttaatgaagctatagaatacttgaaacaggataatgctaatggaattattgccttgaagctagaccgaatcgcacggaatgctttagatgtattgcgtttggttcgtgaaaccttagaaccacaaaataaaatgttagtgttactagatattcaggtagatacttcgacaccttcaggaaaaatgattttaactgtaatgagtgccgttgctgaactcgaaagagacatgatctatgatcgcactcaggggggtagaaagactaaagcccaaaagggcgggtatgcctacgggaaacctaaatttggctataagactgaagaaaaggaactaaaagaagattcagcacaacaggaaactattaaactaattaagagacaccgtaggtcagggaaaagctaccagaaaatagctgattatctcaatgcccaaagtattcccactaaacaaggtaagaaatggagttctagcgtcgtctatcgaatctgtcaggaaaaagctggttaagtctgtttatagatatttagaatttattgaataaaaatagtatgaacaataaatatttatggactaaccacgctcggaaacgtttaactgaacgatgggaaataaaagaatcatgggttattgataccatcgaaaatcctgaacgttcagaatttattgttgatgagtcaggggaaaaatatcattactataaaagaatagctaagtttaagaatagagtgttagaagtgataacttctgccaactcaacacccacaagaataataaccttttactttaaccgtaacatgaggaaaaatttatgattgttacttacgataatgaagttgacgcaatttattttaagttaacggaaaataaaattgatagcaccgaacctcaaacagacaggattatcattgattacgatgaaagtaataatattgttggcattgaggtattagattttaattatcttgtcaagaaaggtttaaccgttgctgatttacctttttctgaagatgaaagattaacagcttctcaatattttaattttcctgttgctatctaatccagaaggggcaataatccccttctttcatcgagttagacttaatatcacaaaagtcattttcattttaccgtttcttttccacagcgtccgtacgcccctcgttaaatctcaaaaccgacaatttatgatgtttataaaaagttactcactttaataagtatttatactcattaaagggttattctttttttgtagcctgataggttgggaaggaatatttcagattatcagatttgttgaatatttttcgtcagatacgcaaaccttacaaacataattaacaactgaaactattgatatgtctaggttttagctctatcacaggttggatctg

SEQ ID NO: 53 - DNA, 13726 bp, Cyanobacterium sp. ABICyano1
tcgaccatgcgtccaaaactttcaccatcctttccctatcaacctttactgcactaaagacaagtgagatagcagtggcaatctggctttgcaatcaatgtttccactaaagcgtttagcgttactgcggctagaagtcctccaccgaggctcccctgaatggtgatatggggaatgggactggtcatcagtcgtcgttttgcccccggagcatgactaaaaccgatcggcattccgatcacaagagccggctgaatatgttgttgctctatcagcttacaggcagtgagtaaaacagaaggggcatagccgatcgccagcacacatccttggggaatctgttgtaaccgctgttgccaatggtcatggtgccaaaaagcttgctcggcttccctaagccctgtgatgtgagggtcgtcaatcagcgttttaaccgtacatcctaaatgagctaaccgagtttgatcaagagccgcagccacaaccggaacatcggtgacgactggacaccctgctttcagtgcatctcgtgccgaggcgatcgctccctgactcaatcgaacggcgtttaccaagctaacatcaccacaggccagcactaattgatgtagtaagtgaatggtaatttcagagtaagccgataaatccggtagcaggtgtttgagggattcctgaaaggcttctggatgagttgttgtctccgcatctaggttcgtccacaactgatcgagttttcctaacccctcctggacatccacatcaagctgtttcagttgggccagagcttccgcttgggtaatctggcaactctggtcgcgtcccagtaatccttctaaagcagatgcggtttggcggagtcgagtaatctgctgaatcacagcctgatattgctgttgcaactgcaccattagggtgggatcaaggctctcttcagaatggctatccagcagttgccgaatatgagacaactgaaagccctgctgtttgagggcaatgactcgttggagccgttgtacgtcctgctgagtataaaggcggtagttgccctctgagcgttgaacggggggaagcaatcccagggtgtggtaatggcgcaccatgcgaggcgtaacgccacctcccactgcatctgtgagttctttaatcgttaagtgattagtcttcatgactttagtttactcaaaaccttgacattgacactaatgttaaggtttaggctgagaaggtaaaaatcgaggataaaaagcatgaattcttataccgtgggtacttatttagccgaacgcttagtgcaaattggtttaaaacatcattttgccgtggctggggactataatttagtgttattggataacttattattaaataaaaacatggaacaagtgtattgttgtaatgaattaaattgtggtttttctgctgaaggttatgctagagctaaaggtgcagctgctgctgttgttacttattctgtgggtgctttatctgcttttgatgctattggtggtgcttatgccgaaaatttacccgtgattttaatttctggtgcccctaataataatgatcatgccgctggacatgttttacatcatgccttaggtaaaaccgattatcattatcaattagaaatggccaaaaatattactgctgctgccgaagctatttatactcctgaagaagcccctgccaaaattgatcatgtgattaaaaccgccttacgcgaaaaaaaacccgtgtatttagaaattgcctgtaatattgcttctatgccttgtgctgctcctgggcctgcttctgctttatttaatgatgaagcctctgatgaagctagtttaaatgctgccgtggaagaaaccttaaaatttattgccaatcgcgataaagttgccgtgttagttggttctaaattaagagctgctggtgctgaagaagctgctgttaaatttgctgatgctttaggtggtgcagttgctactatggctgctgccaaatctttttttcccgaagaaaatccccattatattggaactagttggggagaagtttcttatcctggtgtggaaaaaactatgaaagaagccgacgctgttattgctttagcccctgtgtttaatgattattctaccactggttggactgatattcccgatcccaaaaaattagttttagccgaacctcgttctgttgttgttaatggtgttcgctttccctctgtgcatttaaaagattatttaacccgcttagcccaaaaagtttctaaaaaaactggtgccttagatttttttaaatctttaaatgcgggtgaattaaaaaaagctgctcctgctgatccttctgctcctttagttaatgctgaaattgcccgtcaagttgaagccttattaacccctaatactaccgttattgccgaaactggtgattcttggtttaatgcccaacgcatgaaattacctaatggtgcccgtgttgaatatgaaatgcaatggggtcatattggttggtctgtacctgctgcttttggttatgctgttggtgctcctgaacgtcgtaatattttaatggtgggtgatggttcttttcaattaactgcccaagaagttgcccaaatggttcgcttaaaattacccgttattatttttttaataaataattatggttataccattgaagtgatgattcatgatgggccatataataatattaaaaattgggattatgcgggtttaatggaagtgtttaatggtaatggtggttatgattctggtgctggtaaaggtttaaaagccaaaactggtggtgaattagctgaagctattaaagttgccttagccaatactgatgggccaaccttaattgaatgttttattggtcgcgaagattgtaccgaagaattagttaaatggggtaaacgtgttgctgctgctaattctcgcaaacccgtgaataaattattgtaatttttggggatcaattcgagctcagcaagtttcatcccgaccccctcagggtcgggatttttttattgtactagttgacataagtaaaggcatcccctgcgtgatataattaccttcagtttaaggaggtatacacatatgattaaagcctatgctgccttagaagccaatggtaaattacaaccctttgaatatgatcctggtgctttaggtgccaatgaagtggaaattgaagtgcaatattgtggtgtgtgtcattctgatttatctatgattaataatgaatggggtatttctaattatcccttagttcctggtcatgaagttgttggtactgttgctgctatgggtgaaggtgttaatcatgtggaagtgggtgatttagttggtttaggttggcattctggttattgtatgacctgtcattcttgtttatctggttatcataatttatgtgccactgccgaatctactattgtgggtcattatggtggttttggtgatagagttcgtgctaaaggtgtttctgtggtgaaattacccaaaggtattgatttagcctctgctgggcctttattttgtggtggtattaccgttttttctcccatggtggaattatctttaaaacctaccgccaaagttgctgttattggtattggtggtttaggtcatttagccgttcaatttttaagagcctggggttgtgaagttactgcttttacctcttctgcccgtaaacaaaccgaagttttagaattaggtgcccatcatattttagattctaccaatcctgaagctattgcttctgccgaaggtaaatttgattatattatttctaccgtgaatttaaaattagattggaatttatatatcagtaccttagcccctcaaggtcattttcattttgttggtgtggtgttagaacccttggacttaaacttatttcccttattaatgggacaacgttctgtttctgcttctcctgttggttctcctgctactattgccactatgttagattttgccgtgcgtcatgatattaaacccgtggtggaacaattttcttttgatcaaattaatgaagccattgcccatttagaatctggtaaagcccattatcgcgtggtgttatctcattctaaaaattaataagattaacttctaaactgaaacaaatttgagggtaggcttcattgtctgcccttatttttttatttaggaaaagtgaacagactaaagagtgttggctctattgctttgagtatgtaaattaggcgttgctgaattaaggtatgatttttgaccccttctctcttctgcaggatcatcttgctgaaaaactcgagcgctcgttccgcaaagcggtacggagttagttaggggctaatgggcattctcccgtacaggaaagagttagaagttattaattatcaacaattctcctttgcctagtgcatcgttacctttttaattaaaacataaggaaaactaataatcgtaataatttaacctcaaagtgtaaagaaatgtgaaattctgacttttataacgttaaagagggaaaaattagcagtttaaaatacctagagaatagtctggggtaagcatagagaattagattagttaagttaatcaaattcagaaaaaataataatcgtaaatagttaatctgggtgtatagaaaatgatccccttcatgataagatttaaactcgaaaagcaaaagccaaaaaactaacttccattaaaagaagttgttacatataacgctataaagaaaatttatatatttggaggataccaaccatgtctcatattcaacgtgaaactagttgttctcgccctcgtttaaattctaatatggatgccgatttatatggttataaatgggctcgtgataatgttggtcaatctggtgctactatttatcgtttatatggtaaacctgatgctcctgaattattcttgaaacatggtaaaggttctgttgctaatgatgttactgatgaaatggttcgtttaaactggttgactgaatttatgcctttacctactattaaacattttattcgtactcccgatgatgcttggttattaactactgctattcctggtaaaactgcttttcaagttttagaagaatatcctgattctggtgaaaatattgttgatgctttagctgtttttttacgtcgtttacattctattcccgtttgtaattgtccttttaattctgatcgtgtttttcgtttagctcaagctcaatctcgtatgaataatggtttagttgatgcttctgattttgatgatgaacgtaatggttggcctgttgaacaagtttggaaagaaatgcacaaattgttacctttttctcctgattctgttgttactcatggtgatttttctttagataatttgatctttgatgaaggtaaattgattggttgtattgatgttggtcgtgttggtattgctgatcgttatcaagatttagctattttatggaattgtttaggtgaattttctccttctttacagaaacgtttatttcagaaatatggtattgataatcctgatatgaacaagttacaatttcatttaatgttggacgagttcttttaagaattaattcatgaccaaaatcccttaacgtgagttttcgttccactgagcgtcagaccccgtagaaaagatcaaaggatcttcttgagatcctttttttctgcgcgtaatctgctgctatttaaattacgtacacgtgttattactttgttaacgacaattgtcttaattaactgggcctcatgggccttccgctcactgcccgctttccagtcgggaaacctgtcgtgccagctctgcagatgacggtgaaaacctctgacacatgcagctcccggagacggtcacagcttgtctgtaagcggatgccgggagcagacaagcccgtcagggcgcgtcagcgggtgttggcgggtgtcggggcgcagccatgacccagtcacgtagcgatagcggagtgtatactggcttaactatgcggcatcagagcagattgtactgagagtgcaccatatgcggtgtgaaataccgcacagatgcgtaaggagaaaataccgcatcaggcgctcttccgcttcctcgctcactgactcgctgcgctcggtcgttcggctgcggcgagcggtatcagctcactcaaaggcggtaatacggttatccacagaatcaggggataacgcaggaaagaacatgtgagcaaaaggccagcaaaaggccaggaaccgtaaaaaggccgcgttgctggcgtttttccataggctccgcccccctgacgagcatcacaaaaatcgacgctcaagtcagaggtggcgaaacccgacaggactataaagataccaggcgtttccccctggaagctccctcgtgcgctctcctgttccgaccctgccgcttaccggatacctgtccgcctttctcccttcgggaagcgtggcgctttctcatagctcacgctgtaggtatctcagttcggtgtaggtcgttcgctccaagctgggctgtgtgcacgaaccccccgttcagcccgaccgctgcgccttatccggtaactatcgtcttgagtccaacccggtaagacacgacttatcgccactggcagcagccactggtaacaggattagcagagcgaggtatgtaggcggtgctacagagttcttgaagtggtggcctaactacggctacactagaaggacagtatttggtatctgcgctctgctgaagccagttaccttcggaaaaagagttggtagctcttgatccggcaaacaaaccaccgctggtagcggtggtttttttgtttgcaagcagcagattacgcgcagaaaaaaaggatctcaagaagatcctttgatcttttctactgcagaagcttgttagacaccctgtcatgtattttatattatttatttcaccatacggattaagtgaaacctaatgaaaatagtactttcggagctttaactttaatgaaggtatgtttttttatagacatcgatgtctggtttaacaataggaaaaagtagctaaaactcccatgaattaaagaaataacaaggtgtctaacaacctgttattaagaatgttagaaaagacttaacatttgtgttgagtttttatagacattggtgtctagacatacggtagataaggtttgctcaaaaataaaataaaaaaagattggactaaaaaacatttaatttagtacaatttaattagttattttttcgtctcaaattttgctttgttgagcagaaatttagataaaaaaatccccgtgatcagattacaatgtcgttcattgtacgatgtgtcgaaaaatctttacgacactctaaactgaccacacgggggaaaaagaaaactgaactaataacatcatgatactcggaaaacctagcaattctcaacccctaaacaaaagaaacttccaaaaccctgaccatataaaggagtggcaacaatcagcaatcagtcaagatttgatagcagaaaatcttgtatcggttgctaatggttttgatgtactatttatcggcaataaataccgaactaacacgggtgttctgtcacggcacatattaaactcctattctcatttagaagatggtggttcgtatggtagaacatttgacccatttaccaataaagaaatgcagtgggttcaatttaaaccgaatagaccaagaaaaggttctactggtaaggtaatcaaatatgaatcgccaaaaggtgaacctacaagagttctaatgccgtttgtgcctatgaaaatatggcaacggattagcgataagttcggagtaccgattaatccgaaaaaagatactcacttttgggaatgggtaaagaataatccatcgataccgattgccattacagaaggaaataaaaaagctaattgcctattatcctatggctatcctgctattgcctttgtaggcatttggaacggattagagaaaataaatgatttctcgaaggaaaagcagttaaaagaggatttgaaatggttgttatccaacggcaaccgaaatattaatatcatctttgaccaagaccagaaacaaaaaactgtaattaatgtaaacaaagctattttcgctttatcttctctaataagtagaaatggtcataaagttaatattgtgcaatggttgccgtcaaaaggtaaaggaatagatgattatttggtagctttaccttttgagaaaagagaaaatcatttagacaacttaattaaaattgcaccatcatttaatttttggtcaactaaatacttattcaagtgtcgtaaaccagatttaaccgtaaattgccgttatttgagcgatgcagtaaaagaattacctcaagaggatatagcattaatagcacctcacggcacgggtaaaacttcattagtagctactcacgttaagaatcggagttatcacggaaggaaaactatttcattggtgcatcttgaaagtttagccaaagctaatggcaacgcacttggattatattaccgaaccgaaaataatattgaaaagcaatatcttggatttagcttatgtgtagatagttgccgtgataagattaacggcattacaactgatattatttcaggtcaagattattgccttttcattgatgaaattgaccaagtaattccacacatccttaacagtgaaactgaagtaagtaagtatagatgcaccatcattgacactttttctgaactggtgagaaatgctgaacaggtcattattgctgatgctgatttatccgatgtgacgattgacctaatagaaaacatcagaggtaaaaaactatatgtaatcaagaatgaatatcagtatcagggaatgacttttaacgccgttggttcaccattagaaatgatggcaatgatgggaaaatcggtgtcagaaggcaagaaattatttattaacaccacatcccaaaaggcaaaaagtaagtacggcacaatcgctcttgagtcttatatttttggtctaaataaagaagcaaagatattaagaatagactctgaaaccactaaaaaccctgaacatccagcctataaaatcattgaccaagacttaaataatatcctcaaagattatgattatgtcattgcctcaccttgccttcaaacaggtgtcagtattaccttaaaagggcattttgaccagcaatttaacttttccagtggaaacattacacctcattgctttttacagcaaatgtggcggttgagggatgcagaaattgaaagattctattatgtgccgaactcatctaacctcaatctcattgggaataagtcaagttcaccatcagaccttctaaagagcaataacaagatggcaacggcaacggttaaccttttgggtagaatcgactccgaatattccctagagtatgaatcgcacggcatttggcttgagacgtgggcaaaattatcagcacggcataacagttcaatgcgttgttactctgaaattcttacctatctaattacgtctcaagggcataaattaaatatcaacattccctcacctcttgcagatattaagaagctaaatgatgaggtaagtagtaacagggaaaaggtaaaaaatgagagatactctcagaggttaaactcaccagatattaacgatgcagaagctaccatactcgaatctaaagagcaaaaaatcggattgactctcaatgagagatgcaccctagaaaagcataaagttaagaagcggtatgggaatgtaaagatggatattctcacctttgatgatgatggactataccccaaactcagactattttattacctcaccatcggtaaacctcatctcaaggctaatgacagaaaagctattgccaaaatgggcaatgacaataaaggcaagattctatcaaaagacttagttaataaaacttactccgctcgtgtgaaggtcttagagattcttaaactaactgactttatcgacaatcttagagatgaactcttaataactcccaataatccagctatcaccgattttaataatcttctgctaagagctaagaaggatttaagagtattaggagtcaacatcggaaaatatccaatggccaacattaatgccgtacttactctcattggtcacaaactttctgtaatgagagatgagttcggaaaagagaaaaggataaaagtagatggtaaatcataccgatgttatcaacttgaaacattaccagattttaccaatgatactcttgactactggttagaaaatgatagccaaaaagaagtaacagcaacagaaaattactccgaaaattttaacccttcaaatagctacaatccagacagtaagacactttcagagggtgcaaatttcctatatataaataaagaagaattgcatccaaataaattgcacctagaaataaaagaaggtgctgaactttttttattcggggtaaaggtgattgtgaaaggaatcttggacggggcagtaactatattctctatgggtcaagaatacgatttatccctcaatgaactagaggggatgttaacatcatgaactttacaagaatctttttaaagggcgatcgcaccatgttaaatgatggtacatttgttcagatatttgatatttaccatgaccacgcattgggagtgacccttgaccttaagacagaaaaaattatttccgatgatgttagggtaattactgtcaaagacttattgttcgatggcacttataaaggggtaaaatcttttatgcccgataatgcccgataatgcccgattgatgctacaaaatcccataatcataagcgataatcccctaatagcttgtaattcttgaaccgtagcgattttagagtattccaaaaagaagaaataaacaccgcaaaatgtcgtatttcacatatataaaccaaggttttttgccctaaaatctttatgtttgtagtgtgatgttgggtcaaaatggtcagaaaagttgcaaggtttttatggatgcttacgcgcgcgaggggtaagcatccccaaatagttactttatcctagtccatgcccatttattgccgtcccgttcggctttaaaaaagtgccaaaactcacaaggtgcaataaaaagttctgtacctttcgcaaccctagataatctttcaacagttactttttttcctattatctcggtacaaagtttggctagtttctcttttccctctttttcaatcaagccttcttgtatgcccaactcattgattaatctctctatttttaccattatttcccgttcaggtagtttatcccctaaatcttcatcggggggcaatgtagggcattctgaaggggctttttcttctgtctggacattatctaatattgaagtaaccaaactatcttcagttttttctattcctattaattcatattcggttactgtatccgtatcaatatccgaataactatctttatccgtattagctattcggttaagtttatccgttaactcagaaacaagactatatagcggttttagcttttcttctatcctgttatctaatacggataagtttatacggttatcattatccgtattagtatcattgggcttttttggtagttctaccccctcataaaccgcttttattcccaattccaacagactgataacagtatcctttataatgggttttttgctgatatggtgaacttttgccccttccatcattgcgatactttctatctcactcatcaacttatcgcttaagtgaatctcgtatctgtttaatcccttactggttttattcatatccgtttactttattcggttaacaattctattttatacgaataaaatattatacggttaactttatacgtttaactattttatctatacggataacagtaataagttattcgtattagttatacgtttacttttatccaaataaaattagtgcatttaaactaaaagaatgattttatcggagttgatagcattggattaacctaaagatgtttataagctatatctgataagtatttaaggttattttgttattctgtttattgacattatcagaataaaagaatagaatataattgttgagagataagaggtttaagtgattatggttaagaagttagttggttatgtcagggtcagtagtgaatcgcaagaggataacactagcttacagaatcagatagagagaattgaagcatattgtatggcttttggttatgagttggtaaaaatattcaaagaggttgccactggtacaaaagcagatattgaaacccgtcctatttttaatgaagctatagaatacttgaaacaggataatgctaatggaattattgccttgaagctagaccgaatcgcacggaatgctttagatgtattgcgtttggttcgtgaaaccttagaaccacaaaataaaatgttagtgttactagatattcaggtagatacttcgacaccttcaggaaaaatgattttaactgtaatgagtgccgttgctgaactcgaaagagacatgatctatgatcgcactcaggggggtagaaagactaaagcccaaaagggcgggtatgcctacgggaaacctaaatttggctataagactgaagaaaaggaactaaaagaagattcagcacaacaggaaactattaaactaattaagagacaccgtaggtcagggaaaagctaccagaaaatagctgattatctcaatgcccaaagtattcccactaaacaaggtaagaaatggagttctagcgtcgtctatcgaatctgtcaggaaaaagctggttaagtctgtttatagatatttagaatttattgaataaaaatagtatgaacaataaatatttatggactaaccacgctcggaaacgtttaactgaacgatgggaaataaaagaatcatgggttattgataccatcgaaaatcctgaacgttcagaatttattgttgatgagtcaggggaaaaatatcattactataaaagaatagctaagtttaagaatagagtgttagaagtgataacttctgccaactcaacacccacaagaataataaccttttactttaaccgtaacatgaggaaaaatttatgattgttacttacgataatgaagttgacgcaatttattttaagttaacggaaaataaaattgatagcaccgaacctcaaacagacaggattatcattgattacgatgaaagtaataatattgttggcattgaggtattagattttaattatcttgtcaagaaaggtttaaccgttgctgatttacctttttctgaagatgaaagattaacagcttctcaatattttaattttcctgttgctatctaatccagaaggggcaataatccccttctttcatcgagttagacttaatatcacaaaagtcattttcattttaccgtttcttttccacagcgtccgtacgcccctcgttaaatctcaaaaccgacaatttatgatgtttataaaaagttactcactttaataagtatttatactcattaaagggttattctttttttgtagcctgataggttgggaaggaatatttcagattatcagatttgttgaatatttttcgtcagatacgcaaaccttacaaacataattaacaactgaaactattgatatgtctaggttttagctctatcacaggttggatctg

SEQ ID NO: 54 - DNA, 13726 bp, Cyanobacterium sp. ABICyano1
tcgaccatgcgtccaaaactttcaccatcctttccctatcaacctttactgcactaaagacaagtgagatagcagtggcaatctggctttgcaatcaatgtttccactaaagcgtttagcgttactgcggctagaagtcctccaccgaggctcccctgaatggtgatatggggaatgggactggtcatcagtcgtcgttttgcccccggagcatgactaaaaccgatcggcattccgatcacaagagccggctgaatatgttgttgctctatcagcttacaggcagtgagtaaaacagaaggggcatagccgatcgccagcacacatccttggggaatctgttgtaaccgctgttgccaatggtcatggtgccaaaaagcttgctcggcttccctaagccctgtgatgtgagggtcgtcaatcagcgttttaaccgtacatcctaaatgagctaaccgagtttgatcaagagccgcagccacaaccggaacatcggtgacgactggacaccctgctttcagtgcatctcgtgccgaggcgatcgctccctgactcaatcgaacggcgtttaccaagctaacatcaccacaggccagcactaattgatgtagtaagtgaatggtaatttcagagtaagccgataaatccggtagcaggtgtttgagggattcctgaaaggcttctggatgagttgttgtctccgcatctaggttcgtccacaactgatcgagttttcctaacccctcctggacatccacatcaagctgtttcagttgggccagagcttccgcttgggtaatctggcaactctggtcgcgtcccagtaatccttctaaagcagatgcggtttggcggagtcgagtaatctgctgaatcacagcctgatattgctgttgcaactgcaccattagggtgggatcaaggctctcttcagaatggctatccagcagttgccgaatatgagacaactgaaagccctgctgtttgagggcaatgactcgttggagccgttgtacgtcctgctgagtataaaggcggtagttgccctctgagcgttgaacggggggaagcaatcccagggtgtggtaatggcgcaccatgcgaggcgtaacgccacctcccactgcatctgtgagttctttaatcgttaagtgattagtcttcatgactttagtttactcaaaaccttgacattgacactaatgttaaggtttagaatgagaaggtaaaaatccaagttaaaaagcatgaattcttataccgtgggtacttatttagccgaacgcttagtgcaaattggtttaaaacatcattttgccgtggctggggactataatttagtgttattggataacttattattaaataaaaacatggaacaagtgtattgttgtaatgaattaaattgtggtttttctgctgaaggttatgctagagctaaaggtgcagctgctgctgttgttacttattctgtgggtgctttatctgcttttgatgctattggtggtgcttatgccgaaaatttacccgtgattttaatttctggtgcccctaataataatgatcatgccgctggacatgttttacatcatgccttaggtaaaaccgattatcattatcaattagaaatggccaaaaatattactgctgctgccgaagctatttatactcctgaagaagcccctgccaaaattgatcatgtgattaaaaccgccttacgcgaaaaaaaacccgtgtatttagaaattgcctgtaatattgcttctatgccttgtgctgctcctgggcctgcttctgctttatttaatgatgaagcctctgatgaagctagtttaaatgctgccgtggaagaaaccttaaaatttattgccaatcgcgataaagttgccgtgttagttggttctaaattaagagctgctggtgctgaagaagctgctgttaaatttgctgatgctttaggtggtgcagttgctactatggctgctgccaaatctttttttcccgaagaaaatccccattatattggaactagttggggagaagtttcttatcctggtgtggaaaaaactatgaaagaagccgacgctgttattgctttagcccctgtgtttaatgattattctaccactggttggactgatattcccgatcccaaaaaattagttttagccgaacctcgttctgttgttgttaatggtgttcgctttccctctgtgcatttaaaagattatttaacccgcttagcccaaaaagtttctaaaaaaactggtgccttagatttttttaaatctttaaatgcgggtgaattaaaaaaagctgctcctgctgatccttctgctcctttagttaatgctgaaattgcccgtcaagttgaagccttattaacccctaatactaccgttattgccgaaactggtgattcttggtttaatgcccaacgcatgaaattacctaatggtgcccgtgttgaatatgaaatgcaatggggtcatattggttggtctgtacctgctgcttttggttatgctgttggtgctcctgaacgtcgtaatattttaatggtgggtgatggttcttttcaattaactgcccaagaagttgcccaaatggttcgcttaaaattacccgttattatttttttaataaataattatggttataccattgaagtgatgattcatgatgggccatataataatattaaaaattgggattatgcgggtttaatggaagtgtttaatggtaatggtggttatgattctggtgctggtaaaggtttaaaagccaaaactggtggtgaattagctgaagctattaaagttgccttagccaatactgatgggccaaccttaattgaatgttttattggtcgcgaagattgtaccgaagaattagttaaatggggtaaacgtgttgctgctgctaattctcgcaaacccgtgaataaattattgtaatttttggggatcaattcgagctcagcaagtttcatcccgaccccctcagggtcgggatttttttattgtactagttgacataagtaaaggcatcccctgcgtgatataattaccttcagtttaaggaggtatacacatatgattaaagcctatgctgccttagaagccaatggtaaattacaaccctttgaatatgatcctggtgctttaggtgccaatgaagtggaaattgaagtgcaatattgtggtgtgtgtcattctgatttatctatgattaataatgaatggggtatttctaattatcccttagttcctggtcatgaagttgttggtactgttgctgctatgggtgaaggtgttaatcatgtggaagtgggtgatttagttggtttaggttggcattctggttattgtatgacctgtcattcttgtttatctggttatcataatttatgtgccactgccgaatctactattgtgggtcattatggtggttttggtgatagagttcgtgctaaaggtgtttctgtggtgaaattacccaaaggtattgatttagcctctgctgggcctttattttgtggtggtattaccgttttttctcccatggtggaattatctttaaaacctaccgccaaagttgctgttattggtattggtggtttaggtcatttagccgttcaatttttaagagcctggggttgtgaagttactgcttttacctcttctgcccgtaaacaaaccgaagttttagaattaggtgcccatcatattttagattctaccaatcctgaagctattgcttctgccgaaggtaaatttgattatattatttctaccgtgaatttaaaattagattggaatttatatatcagtaccttagcccctcaaggtcattttcattttgttggtgtggtgttagaacccttggacttaaacttatttcccttattaatgggacaacgttctgtttctgcttctcctgttggttctcctgctactattgccactatgttagattttgccgtgcgtcatgatattaaacccgtggtggaacaattttcttttgatcaaattaatgaagccattgcccatttagaatctggtaaagcccattatcgcgtggtgttatctcattctaaaaattaataagattaacttctaaactgaaacaaatttgagggtaggcttcattgtctgcccttatttttttatttaggaaaagtgaacagactaaagagtgttggctctattgctttgagtatgtaaattaggcgttgctgaattaaggtatgatttttgaccccttctctcttctgcaggatcatcttgctgaaaaactcgagcgctcgttccgcaaagcggtacggagttagttaggggctaatgggcattctcccgtacaggaaagagttagaagttattaattatcaacaattctcctttgcctagtgcatcgttacctttttaattaaaacataaggaaaactaataatcgtaataatttaacctcaaagtgtaaagaaatgtgaaattctgacttttataacgttaaagagggaaaaattagcagtttaaaatacctagagaatagtctggggtaagcatagagaattagattagttaagttaatcaaattcagaaaaaataataatcgtaaatagttaatctgggtgtatagaaaatgatccccttcatgataagatttaaactcgaaaagcaaaagccaaaaaactaacttccattaaaagaagttgttacatataacgctataaagaaaatttatatatttggaggataccaaccatgtctcatattcaacgtgaaactagttgttctcgccctcgtttaaattctaatatggatgccgatttatatggttataaatgggctcgtgataatgttggtcaatctggtgctactatttatcgtttatatggtaaacctgatgctcctgaattattcttgaaacatggtaaaggttctgttgctaatgatgttactgatgaaatggttcgtttaaactggttgactgaatttatgcctttacctactattaaacattttattcgtactcccgatgatgcttggttattaactactgctattcctggtaaaactgcttttcaagttttagaagaatatcctgattctggtgaaaatattgttgatgctttagctgtttttttacgtcgtttacattctattcccgtttgtaattgtccttttaattctgatcgtgtttttcgtttagctcaagctcaatctcgtatgaataatggtttagttgatgcttctgattttgatgatgaacgtaatggttggcctgttgaacaagtttggaaagaaatgcacaaattgttacctttttctcctgattctgttgttactcatggtgatttttctttagataatttgatctttgatgaaggtaaattgattggttgtattgatgttggtcgtgttggtattgctgatcgttatcaagatttagctattttatggaattgtttaggtgaattttctccttctttacagaaacgtttatttcagaaatatggtattgataatcctgatatgaacaagttacaatttcatttaatgttggacgagttcttttaagaattaattcatgaccaaaatcccttaacgtgagttttcgttccactgagcgtcagaccccgtagaaaagatcaaaggatcttcttgagatcctttttttctgcgcgtaatctgctgctatttaaattacgtacacgtgttattactttgttaacgacaattgtcttaattaactgggcctcatgggccttccgctcactgcccgctttccagtcgggaaacctgtcgtgccagctctgcagatgacggtgaaaacctctgacacatgcagctcccggagacggtcacagcttgtctgtaagcggatgccgggagcagacaagcccgtcagggcgcgtcagcgggtgttggcgggtgtcggggcgcagccatgacccagtcacgtagcgatagcggagtgtatactggcttaactatgcggcatcagagcagattgtactgagagtgcaccatatgcggtgtgaaataccgcacagatgcgtaaggagaaaataccgcatcaggcgctcttccgcttcctcgctcactgactcgctgcgctcggtcgttcggctgcggcgagcggtatcagctcactcaaaggcggtaatacggttatccacagaatcaggggataacgcaggaaagaacatgtgagcaaaaggccagcaaaaggccaggaaccgtaaaaaggccgcgttgctggcgtttttccataggctccgcccccctgacgagcatcacaaaaatcgacgctcaagtcagaggtggcgaaacccgacaggactataaagataccaggcgtttccccctggaagctccctcgtgcgctctcctgttccgaccctgccgcttaccggatacctgtccgcctttctcccttcgggaagcgtggcgctttctcatagctcacgctgtaggtatctcagttcggtgtaggtcgttcgctccaagctgggctgtgtgcacgaaccccccgttcagcccgaccgctgcgccttatccggtaactatcgtcttgagtccaacccggtaagacacgacttatcgccactggcagcagccactggtaacaggattagcagagcgaggtatgtaggcggtgctacagagttcttgaagtggtggcctaactacggctacactagaaggacagtatttggtatctgcgctctgctgaagccagttaccttcggaaaaagagttggtagctcttgatccggcaaacaaaccaccgctggtagcggtggtttttttgtttgcaagcagcagattacgcgcagaaaaaaaggatctcaagaagatcctttgatcttttctactgcagaagcttgttagacaccctgtcatgtattttatattatttatttcaccatacggattaagtgaaacctaatgaaaatagtactttcggagctttaactttaatgaaggtatgtttttttatagacatcgatgtctggtttaacaataggaaaaagtagctaaaactcccatgaattaaagaaataacaaggtgtctaacaacctgttattaagaatgttagaaaagacttaacatttgtgttgagtttttatagacattggtgtctagacatacggtagataaggtttgctcaaaaataaaataaaaaaagattggactaaaaaacatttaatttagtacaatttaattagttattttttcgtctcaaattttgctttgttgagcagaaatttagataaaaaaatccccgtgatcagattacaatgtcgttcattgtacgatgtgtcgaaaaatctttacgacactctaaactgaccacacgggggaaaaagaaaactgaactaataacatcatgatactcggaaaacctagcaattctcaacccctaaacaaaagaaacttccaaaaccctgaccatataaaggagtggcaacaatcagcaatcagtcaagatttgatagcagaaaatcttgtatcggttgctaatggttttgatgtactatttatcggcaataaataccgaactaacacgggtgttctgtcacggcacatattaaactcctattctcatttagaagatggtggttcgtatggtagaacatttgacccatttaccaataaagaaatgcagtgggttcaatttaaaccgaatagaccaagaaaaggttctactggtaaggtaatcaaatatgaatcgccaaaaggtgaacctacaagagttctaatgccgtttgtgcctatgaaaatatggcaacggattagcgataagttcggagtaccgattaatccgaaaaaagatactcacttttgggaatgggtaaagaataatccatcgataccgattgccattacagaaggaaataaaaaagctaattgcctattatcctatggctatcctgctattgcctttgtaggcatttggaacggattagagaaaataaatgatttctcgaaggaaaagcagttaaaagaggatttgaaatggttgttatccaacggcaaccgaaatattaatatcatctttgaccaagaccagaaacaaaaaactgtaattaatgtaaacaaagctattttcgctttatcttctctaataagtagaaatggtcataaagttaatattgtgcaatggttgccgtcaaaaggtaaaggaatagatgattatttggtagctttaccttttgagaaaagagaaaatcatttagacaacttaattaaaattgcaccatcatttaatttttggtcaactaaatacttattcaagtgtcgtaaaccagatttaaccgtaaattgccgttatttgagcgatgcagtaaaagaattacctcaagaggatatagcattaatagcacctcacggcacgggtaaaacttcattagtagctactcacgttaagaatcggagttatcacggaaggaaaactatttcattggtgcatcttgaaagtttagccaaagctaatggcaacgcacttggattatattaccgaaccgaaaataatattgaaaagcaatatcttggatttagcttatgtgtagatagttgccgtgataagattaacggcattacaactgatattatttcaggtcaagattattgccttttcattgatgaaattgaccaagtaattccacacatccttaacagtgaaactgaagtaagtaagtatagatgcaccatcattgacactttttctgaactggtgagaaatgctgaacaggtcattattgctgatgctgatttatccgatgtgacgattgacctaatagaaaacatcagaggtaaaaaactatatgtaatcaagaatgaatatcagtatcagggaatgacttttaacgccgttggttcaccattagaaatgatggcaatgatgggaaaatcggtgtcagaaggcaagaaattatttattaacaccacatcccaaaaggcaaaaagtaagtacggcacaatcgctcttgagtcttatatttttggtctaaataaagaagcaaagatattaagaatagactctgaaaccactaaaaaccctgaacatccagcctataaaatcattgaccaagacttaaataatatcctcaaagattatgattatgtcattgcctcaccttgccttcaaacaggtgtcagtattaccttaaaagggcattttgaccagcaatttaacttttccagtggaaacattacacctcattgctttttacagcaaatgtggcggttgagggatgcagaaattgaaagattctattatgtgccgaactcatctaacctcaatctcattgggaataagtcaagttcaccatcagaccttctaaagagcaataacaagatggcaacggcaacggttaaccttttgggtagaatcgactccgaatattccctagagtatgaatcgcacggcatttggcttgagacgtgggcaaaattatcagcacggcataacagttcaatgcgttgttactctgaaattcttacctatctaattacgtctcaagggcataaattaaatatcaacattccctcacctcttgcagatattaagaagctaaatgatgaggtaagtagtaacagggaaaaggtaaaaaatgagagatactctcagaggttaaactcaccagatattaacgatgcagaagctaccatactcgaatctaaagagcaaaaaatcggattgactctcaatgagagatgcaccctagaaaagcataaagttaagaagcggtatgggaatgtaaagatggatattctcacctttgatgatgatggactataccccaaactcagactattttattacctcaccatcggtaaacctcatctcaaggctaatgacagaaaagctattgccaaaatgggcaatgacaataaaggcaagattctatcaaaagacttagttaataaaacttactccgctcgtgtgaaggtcttagagattcttaaactaactgactttatcgacaatcttagagatgaactcttaataactcccaataatccagctatcaccgattttaataatcttctgctaagagctaagaaggatttaagagtattaggagtcaacatcggaaaatatccaatggccaacattaatgccgtacttactctcattggtcacaaactttctgtaatgagagatgagttcggaaaagagaaaaggataaaagtagatggtaaatcataccgatgttatcaacttgaaacattaccagattttaccaatgatactcttgactactggttagaaaatgatagccaaaaagaagtaacagcaacagaaaattactccgaaaattttaacccttcaaatagctacaatccagacagtaagacactttcagagggtgcaaatttcctatatataaataaagaagaattgcatccaaataaattgcacctagaaataaaagaaggtgctgaactttttttattcggggtaaaggtgattgtgaaaggaatcttggacggggcagtaactatattctctatgggtcaagaatacgatttatccctcaatgaactagaggggatgttaacatcatgaactttacaagaatctttttaaagggcgatcgcaccatgttaaatgatggtacatttgttcagatatttgatatttaccatgaccacgcattgggagtgacccttgaccttaagacagaaaaaattatttccgatgatgttagggtaattactgtcaaagacttattgttcgatggcacttataaaggggtaaaatcttttatgcccgataatgcccgataatgcccgattgatgctacaaaatcccataatcataagcgataatcccctaatagcttgtaattcttgaaccgtagcgattttagagtattccaaaaagaagaaataaacaccgcaaaatgtcgtatttcacatatataaaccaaggttttttgccctaaaatctttatgtttgtagtgtgatgttgggtcaaaatggtcagaaaagttgcaaggtttttatggatgcttacgcgcgcgaggggtaagcatccccaaatagttactttatcctagtccatgcccatttattgccgtcccgttcggctttaaaaaagtgccaaaactcacaaggtgcaataaaaagttctgtacctttcgcaaccctagataatctttcaacagttactttttttcctattatctcggtacaaagtttggctagtttctcttttccctctttttcaatcaagccttcttgtatgcccaactcattgattaatctctctatttttaccattatttcccgttcaggtagtttatcccctaaatcttcatcggggggcaatgtagggcattctgaaggggctttttcttctgtctggacattatctaatattgaagtaaccaaactatcttcagttttttctattcctattaattcatattcggttactgtatccgtatcaatatccgaataactatctttatccgtattagctattcggttaagtttatccgttaactcagaaacaagactatatagcggttttagcttttcttctatcctgttatctaatacggataagtttatacggttatcattatccgtattagtatcattgggcttttttggtagttctaccccctcataaaccgcttttattcccaattccaacagactgataacagtatcctttataatgggttttttgctgatatggtgaacttttgccccttccatcattgcgatactttctatctcactcatcaacttatcgcttaagtgaatctcgtatctgtttaatcccttactggttttattcatatccgtttactttattcggttaacaattctattttatacgaataaaatattatacggttaactttatacgtttaactattttatctatacggataacagtaataagttattcgtattagttatacgtttacttttatccaaataaaattagtgcatttaaactaaaagaatgattttatcggagttgatagcattggattaacctaaagatgtttataagctatatctgataagtatttaaggttattttgttattctgtttattgacattatcagaataaaagaatagaatataattgttgagagataagaggtttaagtgattatggttaagaagttagttggttatgtcagggtcagtagtgaatcgcaagaggataacactagcttacagaatcagatagagagaattgaagcatattgtatggcttttggttatgagttggtaaaaatattcaaagaggttgccactggtacaaaagcagatattgaaacccgtcctatttttaatgaagctatagaatacttgaaacaggataatgctaatggaattattgccttgaagctagaccgaatcgcacggaatgctttagatgtattgcgtttggttcgtgaaaccttagaaccacaaaataaaatgttagtgttactagatattcaggtagatacttcgacaccttcaggaaaaatgattttaactgtaatgagtgccgttgctgaactcgaaagagacatgatctatgatcgcactcaggggggtagaaagactaaagcccaaaagggcgggtatgcctacgggaaacctaaatttggctataagactgaagaaaaggaactaaaagaagattcagcacaacaggaaactattaaactaattaagagacaccgtaggtcagggaaaagctaccagaaaatagctgattatctcaatgcccaaagtattcccactaaacaaggtaagaaatggagttctagcgtcgtctatcgaatctgtcaggaaaaagctggttaagtctgtttatagatatttagaatttattgaataaaaatagtatgaacaataaatatttatggactaaccacgctcggaaacgtttaactgaacgatgggaaataaaagaatcatgggttattgataccatcgaaaatcctgaacgttcagaatttattgttgatgagtcaggggaaaaatatcattactataaaagaatagctaagtttaagaatagagtgttagaagtgataacttctgccaactcaacacccacaagaataataaccttttactttaaccgtaacatgaggaaaaatttatgattgttacttacgataatgaagttgacgcaatttattttaagttaacggaaaataaaattgatagcaccgaacctcaaacagacaggattatcattgattacgatgaaagtaataatattgttggcattgaggtattagattttaattatcttgtcaagaaaggtttaaccgttgctgatttacctttttctgaagatgaaagattaacagcttctcaatattttaattttcctgttgctatctaatccagaaggggcaataatccccttctttcatcgagttagacttaatatcacaaaagtcattttcattttaccgtttcttttccacagcgtccgtacgcccctcgttaaatctcaaaaccgacaatttatgatgtttataaaaagttactcactttaataagtatttatactcattaaagggttattctttttttgtagcctgataggttgggaaggaatatttcagattatcagatttgttgaatatttttcgtcagatacgcaaaccttacaaacataattaacaactgaaactattgatatgtctaggttttagctctatcacaggttggatctg

SEQ ID NO: 55 - DNA, 13726 bp, Cyanobacterium sp. ABICyano1
tcgaccatgcgtccaaaactttcaccatcctttccctatcaacctttactgcactaaagacaagtgagatagcagtggcaatctggctttgcaatcaatgtttccactaaagcgtttagcgttactgcggctagaagtcctccaccgaggctcccctgaatggtgatatggggaatgggactggtcatcagtcgtcgttttgcccccggagcatgactaaaaccgatcggcattccgatcacaagagccggctgaatatgttgttgctctatcagcttacaggcagtgagtaaaacagaaggggcatagccgatcgccagcacacatccttggggaatctgttgtaaccgctgttgccaatggtcatggtgccaaaaagcttgctcggcttccctaagccctgtgatgtgagggtcgtcaatcagcgttttaaccgtacatcctaaatgagctaaccgagtttgatcaagagccgcagccacaaccggaacatcggtgacgactggacaccctgctttcagtgcatctcgtgccgaggcgatcgctccctgactcaatcgaacggcgtttaccaagctaacatcaccacaggccagcactaattgatgtagtaagtgaatggtaatttcagagtaagccgataaatccggtagcaggtgtttgagggattcctgaaaggcttctggatgagttgttgtctccgcatctaggttcgtccacaactgatcgagttttcctaacccctcctggacatccacatcaagctgtttcagttgggccagagcttccgcttgggtaatctggcaactctggtcgcgtcccagtaatccttctaaagcagatgcggtttggcggagtcgagtaatctgctgaatcacagcctgatattgctgttgcaactgcaccattagggtgggatcaaggctctcttcagaatggctatccagcagttgccgaatatgagacaactgaaagccctgctgtttgagggcaatgactcgttggagccgttgtacgtcctgctgagtataaaggcggtagttgccctctgagcgttgaacggggggaagcaatcccagggtgtggtaatggcgcaccatgcgaggcgtaacgccacctcccactgcatctgtgagttctttaatcgttaagtgattagtcttcatgactttagtttactcaaaaccttgacattgacactaatgttaaggtttagaatgagaaggtaaaaatcgaggataaaaagcatgaattcttataccgtgggtacttatttagccgaacgcttagtgcaaattggtttaaaacatcattttgccgtggctggggactataatttagtgttattggataacttattattaaataaaaacatggaacaagtgtattgttgtaatgaattaaattgtggtttttctgctgaaggttatgctagagctaaaggtgcagctgctgctgttgttacttattctgtgggtgctttatctgcttttgatgctattggtggtgcttatgccgaaaatttacccgtgattttaatttctggtgcccctaataataatgatcatgccgctggacatgttttacatcatgccttaggtaaaaccgattatcattatcaattagaaatggccaaaaatattactgctgctgccgaagctatttatactcctgaagaagcccctgccaaaattgatcatgtgattaaaaccgccttacgcgaaaaaaaacccgtgtatttagaaattgcctgtaatattgcttctatgccttgtgctgctcctgggcctgcttctgctttatttaatgatgaagcctctgatgaagctagtttaaatgctgccgtggaagaaaccttaaaatttattgccaatcgcgataaagttgccgtgttagttggttctaaattaagagctgctggtgctgaagaagctgctgttaaatttgctgatgctttaggtggtgcagttgctactatggctgctgccaaatctttttttcccgaagaaaatccccattatattggaactagttggggagaagtttcttatcctggtgtggaaaaaactatgaaagaagccgacgctgttattgctttagcccctgtgtttaatgattattctaccactggttggactgatattcccgatcccaaaaaattagttttagccgaacctcgttctgttgttgttaatggtgttcgctttccctctgtgcatttaaaagattatttaacccgcttagcccaaaaagtttctaaaaaaactggtgccttagatttttttaaatctttaaatgcgggtgaattaaaaaaagctgctcctgctgatccttctgctcctttagttaatgctgaaattgcccgtcaagttgaagccttattaacccctaatactaccgttattgccgaaactggtgattcttggtttaatgcccaacgcatgaaattacctaatggtgcccgtgttgaatatgaaatgcaatggggtcatattggttggtctgtacctgctgcttttggttatgctgttggtgctcctgaacgtcgtaatattttaatggtgggtgatggttcttttcaattaactgcccaagaagttgcccaaatggttcgcttaaaattacccgttattatttttttaataaataattatggttataccattgaagtgatgattcatgatgggccatataataatattaaaaattgggattatgcgggtttaatggaagtgtttaatggtaatggtggttatgattctggtgctggtaaaggtttaaaagccaaaactggtggtgaattagctgaagctattaaagttgccttagccaatactgatgggccaaccttaattgaatgttttattggtcgcgaagattgtaccgaagaattagttaaatggggtaaacgtgttgctgctgctaattctcgcaaacccgtgaataaattattgtaatttttggggatcaattcgagctcagcaagtttcatcccgaccccctcagggtcgggatttttttattgtactagttgacataagtaaaggcatcccctgcgtgatataattaccttcagtttaaggaggtatacacatatgattaaagcctatgctgccttagaagccaatggtaaattacaaccctttgaatatgatcctggtgctttaggtgccaatgaagtggaaattgaagtgcaatattgtggtgtgtgtcattctgatttatctatgattaataatgaatggggtatttctaattatcccttagttcctggtcatgaagttgttggtactgttgctgctatgggtgaaggtgttaatcatgtggaagtgggtgatttagttggtttaggttggcattctggttattgtatgacctgtcattcttgtttatctggttatcataatttatgtgccactgccgaatctactattgtgggtcattatggtggttttggtgatagagttcgtgctaaaggtgtttctgtggtgaaattacccaaaggtattgatttagcctctgctgggcctttattttgtggtggtattaccgttttttctcccatggtggaattatctttaaaacctaccgccaaagttgctgttattggtattggtggtttaggtcatttagccgttcaatttttaagagcctggggttgtgaagttactgcttttacctcttctgcccgtaaacaaaccgaagttttagaattaggtgcccatcatattttagattctaccaatcctgaagctattgcttctgccgaaggtaaatttgattatattatttctaccgtgaatttaaaattagattggaatttatatatcagtaccttagcccctcaaggtcattttcattttgttggtgtggtgttagaacccttggacttaaacttatttcccttattaatgggacaacgttctgtttctgcttctcctgttggttctcctgctactattgccactatgttagattttgccgtgcgtcatgatattaaacccgtggtggaacaattttcttttgatcaaattaatgaagccattgcccatttagaatctggtaaagcccattatcgcgtggtgttatctcattctaaaaattaataagattaacttctaaactgaaacaaatttgagggtaggcttcattgtctgcccttatttttttatttaggaaaagtgaacagactaaagagtgttggctctattgctttgagtatgtaaattaggcgttgctgaattaaggtatgatttttgaccccttctctcttctgcaggatcatcttgctgaaaaactcgagcgctcgttccgcaaagcggtacggagttagttaggggctaatgggcattctcccgtacaggaaagagttagaagttattaattatcaacaattctcctttgcctagtgcatcgttacctttttaattaaaacataaggaaaactaataatcgtaataatttaacctcaaagtgtaaagaaatgtgaaattctgacttttataacgttaaagagggaaaaattagcagtttaaaatacctagagaatagtctggggtaagcatagagaattagattagttaagttaatcaaattcagaaaaaataataatcgtaaatagttaatctgggtgtatagaaaatgatccccttcatgataagatttaaactcgaaaagcaaaagccaaaaaactaacttccattaaaagaagttgttacatataacgctataaagaaaatttatatatttggaggataccaaccatgtctcatattcaacgtgaaactagttgttctcgccctcgtttaaattctaatatggatgccgatttatatggttataaatgggctcgtgataatgttggtcaatctggtgctactatttatcgtttatatggtaaacctgatgctcctgaattattcttgaaacatggtaaaggttctgttgctaatgatgttactgatgaaatggttcgtttaaactggttgactgaatttatgcctttacctactattaaacattttattcgtactcccgatgatgcttggttattaactactgctattcctggtaaaactgcttttcaagttttagaagaatatcctgattctggtgaaaatattgttgatgctttagctgtttttttacgtcgtttacattctattcccgtttgtaattgtccttttaattctgatcgtgtttttcgtttagctcaagctcaatctcgtatgaataatggtttagttgatgcttctgattttgatgatgaacgtaatggttggcctgttgaacaagtttggaaagaaatgcacaaattgttacctttttctcctgattctgttgttactcatggtgatttttctttagataatttgatctttgatgaaggtaaattgattggttgtattgatgttggtcgtgttggtattgctgatcgttatcaagatttagctattttatggaattgtttaggtgaattttctccttctttacagaaacgtttatttcagaaatatggtattgataatcctgatatgaacaagttacaatttcatttaatgttggacgagttcttttaagaattaattcatgaccaaaatcccttaacgtgagttttcgttccactgagcgtcagaccccgtagaaaagatcaaaggatcttcttgagatcctttttttctgcgcgtaatctgctgctatttaaattacgtacacgtgttattactttgttaacgacaattgtcttaattaactgggcctcatgggccttccgctcactgcccgctttccagtcgggaaacctgtcgtgccagctctgcagatgacggtgaaaacctctgacacatgcagctcccggagacggtcacagcttgtctgtaagcggatgccgggagcagacaagcccgtcagggcgcgtcagcgggtgttggcgggtgtcggggcgcagccatgacccagtcacgtagcgatagcggagtgtatactggcttaactatgcggcatcagagcagattgtactgagagtgcaccatatgcggtgtgaaataccgcacagatgcgtaaggagaaaataccgcatcaggcgctcttccgcttcctcgctcactgactcgctgcgctcggtcgttcggctgcggcgagcggtatcagctcactcaaaggcggtaatacggttatccacagaatcaggggataacgcaggaaagaacatgtgagcaaaaggccagcaaaaggccaggaaccgtaaaaaggccgcgttgctggcgtttttccataggctccgcccccctgacgagcatcacaaaaatcgacgctcaagtcagaggtggcgaaacccgacaggactataaagataccaggcgtttccccctggaagctccctcgtgcgctctcctgttccgaccctgccgcttaccggatacctgtccgcctttctcccttcgggaagcgtggcgctttctcatagctcacgctgtaggtatctcagttcggtgtaggtcgttcgctccaagctgggctgtgtgcacgaaccccccgttcagcccgaccgctgcgccttatccggtaactatcgtcttgagtccaacccggtaagacacgacttatcgccactggcagcagccactggtaacaggattagcagagcgaggtatgtaggcggtgctacagagttcttgaagtggtggcctaactacggctacactagaaggacagtatttggtatctgcgctctgctgaagccagttaccttcggaaaaagagttggtagctcttgatccggcaaacaaaccaccgctggtagcggtggtttttttgtttgcaagcagcagattacgcgcagaaaaaaaggatctcaagaagatcctttgatcttttctactgcagaagcttgttagacaccctgtcatgtattttatattatttatttcaccatacggattaagtgaaacctaatgaaaatagtactttcggagctttaactttaatgaaggtatgtttttttatagacatcgatgtctggtttaacaataggaaaaagtagctaaaactcccatgaattaaagaaataacaaggtgtctaacaacctgttattaagaatgttagaaaagacttaacatttgtgttgagtttttatagacattggtgtctagacatacggtagataaggtttgctcaaaaataaaataaaaaaagattggactaaaaaacatttaatttagtacaatttaattagttattttttcgtctcaaattttgctttgttgagcagaaatttagataaaaaaatccccgtgatcagattacaatgtcgttcattgtacgatgtgtcgaaaaatctttacgacactctaaactgaccacacgggggaaaaagaaaactgaactaataacatcatgatactcggaaaacctagcaattctcaacccctaaacaaaagaaacttccaaaaccctgaccatataaaggagtggcaacaatcagcaatcagtcaagatttgatagcagaaaatcttgtatcggttgctaatggttttgatgtactatttatcggcaataaataccgaactaacacgggtgttctgtcacggcacatattaaactcctattctcatttagaagatggtggttcgtatggtagaacatttgacccatttaccaataaagaaatgcagtgggttcaatttaaaccgaatagaccaagaaaaggttctactggtaaggtaatcaaatatgaatcgccaaaaggtgaacctacaagagttctaatgccgtttgtgcctatgaaaatatggcaacggattagcgataagttcggagtaccgattaatccgaaaaaagatactcacttttgggaatgggtaaagaataatccatcgataccgattgccattacagaaggaaataaaaaagctaattgcctattatcctatggctatcctgctattgcctttgtaggcatttggaacggattagagaaaataaatgatttctcgaaggaaaagcagttaaaagaggatttgaaatggttgttatccaacggcaaccgaaatattaatatcatctttgaccaagaccagaaacaaaaaactgtaattaatgtaaacaaagctattttcgctttatcttctctaataagtagaaatggtcataaagttaatattgtgcaatggttgccgtcaaaaggtaaaggaatagatgattatttggtagctttaccttttgagaaaagagaaaatcatttagacaacttaattaaaattgcaccatcatttaatttttggtcaactaaatacttattcaagtgtcgtaaaccagatttaaccgtaaattgccgttatttgagcgatgcagtaaaagaattacctcaagaggatatagcattaatagcacctcacggcacgggtaaaacttcattagtagctactcacgttaagaatcggagttatcacggaaggaaaactatttcattggtgcatcttgaaagtttagccaaagctaatggcaacgcacttggattatattaccgaaccgaaaataatattgaaaagcaatatcttggatttagcttatgtgtagatagttgccgtgataagattaacggcattacaactgatattatttcaggtcaagattattgccttttcattgatgaaattgaccaagtaattccacacatccttaacagtgaaactgaagtaagtaagtatagatgcaccatcattgacactttttctgaactggtgagaaatgctgaacaggtcattattgctgatgctgatttatccgatgtgacgattgacctaatagaaaacatcagaggtaaaaaactatatgtaatcaagaatgaatatcagtatcagggaatgacttttaacgccgttggttcaccattagaaatgatggcaatgatgggaaaatcggtgtcagaaggcaagaaattatttattaacaccacatcccaaaaggcaaaaagtaagtacggcacaatcgctcttgagtcttatatttttggtctaaataaagaagcaaagatattaagaatagactctgaaaccactaaaaaccctgaacatccagcctataaaatcattgaccaagacttaaataatatcctcaaagattatgattatgtcattgcctcaccttgccttcaaacaggtgtcagtattaccttaaaagggcattttgaccagcaatttaacttttccagtggaaacattacacctcattgctttttacagcaaatgtggcggttgagggatgcagaaattgaaagattctattatgtgccgaactcatctaacctcaatctcattgggaataagtcaagttcaccatcagaccttctaaagagcaataacaagatggcaacggcaacggttaaccttttgggtagaatcgactccgaatattccctagagtatgaatcgcacggcatttggcttgagacgtgggcaaaattatcagcacggcataacagttcaatgcgttgttactctgaaattcttacctatctaattacgtctcaagggcataaattaaatatcaacattccctcacctcttgcagatattaagaagctaaatgatgaggtaagtagtaacagggaaaaggtaaaaaatgagagatactctcagaggttaaactcaccagatattaacgatgcagaagctaccatactcgaatctaaagagcaaaaaatcggattgactctcaatgagagatgcaccctagaaaagcataaagttaagaagcggtatgggaatgtaaagatggatattctcacctttgatgatgatggactataccccaaactcagactattttattacctcaccatcggtaaacctcatctcaaggctaatgacagaaaagctattgccaaaatgggcaatgacaataaaggcaagattctatcaaaagacttagttaataaaacttactccgctcgtgtgaaggtcttagagattcttaaactaactgactttatcgacaatcttagagatgaactcttaataactcccaataatccagctatcaccgattttaataatcttctgctaagagctaagaaggatttaagagtattaggagtcaacatcggaaaatatccaatggccaacattaatgccgtacttactctcattggtcacaaactttctgtaatgagagatgagttcggaaaagagaaaaggataaaagtagatggtaaatcataccgatgttatcaacttgaaacattaccagattttaccaatgatactcttgactactggttagaaaatgatagccaaaaagaagtaacagcaacagaaaattactccgaaaattttaacccttcaaatagctacaatccagacagtaagacactttcagagggtgcaaatttcctatatataaataaagaagaattgcatccaaataaattgcacctagaaataaaagaaggtgctgaactttttttattcggggtaaaggtgattgtgaaaggaatcttggacggggcagtaactatattctctatgggtcaagaatacgatttatccctcaatgaactagaggggatgttaacatcatgaactttacaagaatctttttaaagggcgatcgcaccatgttaaatgatggtacatttgttcagatatttgatatttaccatgaccacgcattgggagtgacccttgaccttaagacagaaaaaattatttccgatgatgttagggtaattactgtcaaagacttattgttcgatggcacttataaaggggtaaaatcttttatgcccgataatgcccgataatgcccgattgatgctacaaaatcccataatcataagcgataatcccctaatagcttgtaattcttgaaccgtagcgattttagagtattccaaaaagaagaaataaacaccgcaaaatgtcgtatttcacatatataaaccaaggttttttgccctaaaatctttatgtttgtagtgtgatgttgggtcaaaatggtcagaaaagttgcaaggtttttatggatgcttacgcgcgcgaggggtaagcatccccaaatagttactttatcctagtccatgcccatttattgccgtcccgttcggctttaaaaaagtgccaaaactcacaaggtgcaataaaaagttctgtacctttcgcaaccctagataatctttcaacagttactttttttcctattatctcggtacaaagtttggctagtttctcttttccctctttttcaatcaagccttcttgtatgcccaactcattgattaatctctctatttttaccattatttcccgttcaggtagtttatcccctaaatcttcatcggggggcaatgtagggcattctgaaggggctttttcttctgtctggacattatctaatattgaagtaaccaaactatcttcagttttttctattcctattaattcatattcggttactgtatccgtatcaatatccgaataactatctttatccgtattagctattcggttaagtttatccgttaactcagaaacaagactatatagcggttttagcttttcttctatcctgttatctaatacggataagtttatacggttatcattatccgtattagtatcattgggcttttttggtagttctaccccctcataaaccgcttttattcccaattccaacagactgataacagtatcctttataatgggttttttgctgatatggtgaacttttgccccttccatcattgcgatactttctatctcactcatcaacttatcgcttaagtgaatctcgtatctgtttaatcccttactggttttattcatatccgtttactttattcggttaacaattctattttatacgaataaaatattatacggttaactttatacgtttaactattttatctatacggataacagtaataagttattcgtattagttatacgtttacttttatccaaataaaattagtgcatttaaactaaaagaatgattttatcggagttgatagcattggattaacctaaagatgtttataagctatatctgataagtatttaaggttattttgttattctgtttattgacattatcagaataaaagaatagaatataattgttgagagataagaggtttaagtgattatggttaagaagttagttggttatgtcagggtcagtagtgaatcgcaagaggataacactagcttacagaatcagatagagagaattgaagcatattgtatggcttttggttatgagttggtaaaaatattcaaagaggttgccactggtacaaaagcagatattgaaacccgtcctatttttaatgaagctatagaatacttgaaacaggataatgctaatggaattattgccttgaagctagaccgaatcgcacggaatgctttagatgtattgcgtttggttcgtgaaaccttagaaccacaaaataaaatgttagtgttactagatattcaggtagatacttcgacaccttcaggaaaaatgattttaactgtaatgagtgccgttgctgaactcgaaagagacatgatctatgatcgcactcaggggggtagaaagactaaagcccaaaagggcgggtatgcctacgggaaacctaaatttggctataagactgaagaaaaggaactaaaagaagattcagcacaacaggaaactattaaactaattaagagacaccgtaggtcagggaaaagctaccagaaaatagctgattatctcaatgcccaaagtattcccactaaacaaggtaagaaatggagttctagcgtcgtctatcgaatctgtcaggaaaaagctggttaagtctgtttatagatatttagaatttattgaataaaaatagtatgaacaataaatatttatggactaaccacgctcggaaacgtttaactgaacgatgggaaataaaagaatcatgggttattgataccatcgaaaatcctgaacgttcagaatttattgttgatgagtcaggggaaaaatatcattactataaaagaatagctaagtttaagaatagagtgttagaagtgataacttctgccaactcaacacccacaagaataataaccttttactttaaccgtaacatgaggaaaaatttatgattgttacttacgataatgaagttgacgcaatttattttaagttaacggaaaataaaattgatagcaccgaacctcaaacagacaggattatcattgattacgatgaaagtaataatattgttggcattgaggtattagattttaattatcttgtcaagaaaggtttaaccgttgctgatttacctttttctgaagatgaaagattaacagcttctcaatattttaattttcctgttgctatctaatccagaaggggcaataatccccttctttcatcgagttagacttaatatcacaaaagtcattttcattttaccgtttcttttccacagcgtccgtacgcccctcgttaaatctcaaaaccgacaatttatgatgtttataaaaagttactcactttaataagtatttatactcattaaagggttattctttttttgtagcctgataggttgggaaggaatatttcagattatcagatttgttgaatatttttcgtcagatacgcaaaccttacaaacataattaacaactgaaactattgatatgtctaggttttagctctatcacaggttggatctg

SEQ ID NO: 56 - DNA, 12973 bp, Cyanobacterium sp. ABICyano1
tcgtcagatacgcaaaccttacaaacataattaacaactgaaactattgatatgtctaggttttagctctatcacaggttggatctgtcgacgggcaaactttatgaagcagatcaagcctatatccgccaagcaaccggcagccgcgttgattagtgggtgtgtccatcctctggttcgtctaggtgctccgaagcgtcacgatagagattaagaatgtggtgatccttgaggcgataaatcacattccgcccttccttgcgatagctcactaaacgtgctgtgcgcagggttcttagttggtgagagacagccgattcactcatttcaacggcggcggcgagttcccccacccgcatctctccagtggccagggccgaaagaatacgccagcggttggcatcccccaagacaccaaaaaattcggccatccgttgggccttggcttggttcaagattttgccactgtggtctgtcattgttcgctgatctaaacaatacctgaataattgttcatgtgttaatctaaaaatgtgaacaatcgttcaactatttaagacaataccttggaggtttaaaccatgaattcttataccgtgggtacttatttagccgaacgcttagtgcaaattggtttaaaacatcattttgccgtggctggggactataatttagtgttattggataacttattattaaataaaaacatggaacaagtgtattgttgtaatgaattaaattgtggtttttctgctgaaggttatgctagagctaaaggtgcagctgctgctgttgttacttattctgtgggtgctttatctgcttttgatgctattggtggtgcttatgccgaaaatttacccgtgattttaatttctggtgcccctaataataatgatcatgccgctggacatgttttacatcatgccttaggtaaaaccgattatcattatcaattagaaatggccaaaaatattactgctgctgccgaagctatttatactcctgaagaagcccctgccaaaattgatcatgtgattaaaaccgccttacgcgaaaaaaaacccgtgtatttagaaattgcctgtaatattgcttctatgccttgtgctgctcctgggcctgcttctgctttatttaatgatgaagcctctgatgaagctagtttaaatgctgccgtggaagaaaccttaaaatttattgccaatcgcgataaagttgccgtgttagttggttctaaattaagagctgctggtgctgaagaagctgctgttaaatttgctgatgctttaggtggtgcagttgctactatggctgctgccaaatctttttttcccgaagaaaatccccattatattggaactagttggggagaagtttcttatcctggtgtggaaaaaactatgaaagaagccgacgctgttattgctttagcccctgtgtttaatgattattctaccactggttggactgatattcccgatcccaaaaaattagttttagccgaacctcgttctgttgttgttaatggtgttcgctttccctctgtgcatttaaaagattatttaacccgcttagcccaaaaagtttctaaaaaaactggtgccttagatttttttaaatctttaaatgcgggtgaattaaaaaaagctgctcctgctgatccttctgctcctttagttaatgctgaaattgcccgtcaagttgaagccttattaacccctaatactaccgttattgccgaaactggtgattcttggtttaatgcccaacgcatgaaattacctaatggtgcccgtgttgaatatgaaatgcaatggggtcatattggttggtctgtacctgctgcttttggttatgctgttggtgctcctgaacgtcgtaatattttaatggtgggtgatggttcttttcaattaactgcccaagaagttgcccaaatggttcgcttaaaattacccgttattatttttttaataaataattatggttataccattgaagtgatgattcatgatgggccatataataatattaaaaattgggattatgcgggtttaatggaagtgtttaatggtaatggtggttatgattctggtgctggtaaaggtttaaaagccaaaactggtggtgaattagctgaagctattaaagttgccttagccaatactgatgggccaaccttaattgaatgttttattggtcgcgaagattgtaccgaagaattagttaaatggggtaaacgtgttgctgctgctaattctcgcaaacccgtgaataaattattgtaatttttggggatcaattcgagctcagcaagtttcatcccgaccccctcagggtcgggatttttttattgtactagttgacataagtaaaggcatcccctgcgtgatataattaccttcagtttaaggaggtatacacatatgattaaagcctatgctgccttagaagccaatggtaaattacaaccctttgaatatgatcctggtgctttaggtgccaatgaagtggaaattgaagtgcaatattgtggtgtgtgtcattctgatttatctatgattaataatgaatggggtatttctaattatcccttagttcctggtcatgaagttgttggtactgttgctgctatgggtgaaggtgttaatcatgtggaagtgggtgatttagttggtttaggttggcattctggttattgtatgacctgtcattcttgtttatctggttatcataatttatgtgccactgccgaatctactattgtgggtcattatggtggttttggtgatagagttcgtgctaaaggtgtttctgtggtgaaattacccaaaggtattgatttagcctctgctgggcctttattttgtggtggtattaccgttttttctcccatggtggaattatctttaaaacctaccgccaaagttgctgttattggtattggtggtttaggtcatttagccgttcaatttttaagagcctggggttgtgaagttactgcttttacctcttctgcccgtaaacaaaccgaagttttagaattaggtgcccatcatattttagattctaccaatcctgaagctattgcttctgccgaaggtaaatttgattatattatttctaccgtgaatttaaaattagattggaatttatatatcagtaccttagcccctcaaggtcattttcattttgttggtgtggtgttagaacccttggacttaaacttatttcccttattaatgggacaacgttctgtttctgcttctcctgttggttctcctgctactattgccactatgttagattttgccgtgcgtcatgatattaaacccgtggtggaacaattttcttttgatcaaattaatgaagccattgcccatttagaatctggtaaagcccattatcgcgtggtgttatctcattctaaaaattaataagattaacttctaaactgaaacaaatttgagggtaggcttcattgtctgcccttatttttttatttaggaaaagtgaacagactaaagagtgttggctctattgctttgagtatgtaaattaggcgttgctgaattaaggtatgatttttgaccccttctctcttctgcaggatcatcttgctgaaaaactcgagcgctcgttccgcaaagcggtacggagttagttaggggctaatgggcattctcccgtacaggaaagagttagaagttattaattatcaacaattctcctttgcctagtgcatcgttacctttttaattaaaacataaggaaaactaataatcgtaataatttaacctcaaagtgtaaagaaatgtgaaattctgacttttataacgttaaagagggaaaaattagcagtttaaaatacctagagaatagtctggggtaagcatagagaattagattagttaagttaatcaaattcagaaaaaataataatcgtaaatagttaatctgggtgtatagaaaatgatccccttcatgataagatttaaactcgaaaagcaaaagccaaaaaactaacttccattaaaagaagttgttacatataacgctataaagaaaatttatatatttggaggataccaaccatgtctcatattcaacgtgaaactagttgttctcgccctcgtttaaattctaatatggatgccgatttatatggttataaatgggctcgtgataatgttggtcaatctggtgctactatttatcgtttatatggtaaacctgatgctcctgaattattcttgaaacatggtaaaggttctgttgctaatgatgttactgatgaaatggttcgtttaaactggttgactgaatttatgcctttacctactattaaacattttattcgtactcccgatgatgcttggttattaactactgctattcctggtaaaactgcttttcaagttttagaagaatatcctgattctggtgaaaatattgttgatgctttagctgtttttttacgtcgtttacattctattcccgtttgtaattgtccttttaattctgatcgtgtttttcgtttagctcaagctcaatctcgtatgaataatggtttagttgatgcttctgattttgatgatgaacgtaatggttggcctgttgaacaagtttggaaagaaatgcacaaattgttacctttttctcctgattctgttgttactcatggtgatttttctttagataatttgatctttgatgaaggtaaattgattggttgtattgatgttggtcgtgttggtattgctgatcgttatcaagatttagctattttatggaattgtttaggtgaattttctccttctttacagaaacgtttatttcagaaatatggtattgataatcctgatatgaacaagttacaatttcatttaatgttggacgagttcttttaagaattaattcatgaccaaaatcccttaacgtgagttttcgttccactgagcgtcagaccccgtagaaaagatcaaaggatcttcttgagatcctttttttctgcgcgtaatctgctgctatttaaattacgtacacgtgttattactttgttaacgacaattgtcttaattaactgggcctcatgggccttccgctcactgcccgctttccagtcgggaaacctgtcgtgccagctctgcagatgacggtgaaaacctctgacacatgcagctcccggagacggtcacagcttgtctgtaagcggatgccgggagcagacaagcccgtcagggcgcgtcagcgggtgttggcgggtgtcggggcgcagccatgacccagtcacgtagcgatagcggagtgtatactggcttaactatgcggcatcagagcagattgtactgagagtgcaccatatgcggtgtgaaataccgcacagatgcgtaaggagaaaataccgcatcaggcgctcttccgcttcctcgctcactgactcgctgcgctcggtcgttcggctgcggcgagcggtatcagctcactcaaaggcggtaatacggttatccacagaatcaggggataacgcaggaaagaacatgtgagcaaaaggccagcaaaaggccaggaaccgtaaaaaggccgcgttgctggcgtttttccataggctccgcccccctgacgagcatcacaaaaatcgacgctcaagtcagaggtggcgaaacccgacaggactataaagataccaggcgtttccccctggaagctccctcgtgcgctctcctgttccgaccctgccgcttaccggatacctgtccgcctttctcccttcgggaagcgtggcgctttctcatagctcacgctgtaggtatctcagttcggtgtaggtcgttcgctccaagctgggctgtgtgcacgaaccccccgttcagcccgaccgctgcgccttatccggtaactatcgtcttgagtccaacccggtaagacacgacttatcgccactggcagcagccactggtaacaggattagcagagcgaggtatgtaggcggtgctacagagttcttgaagtggtggcctaactacggctacactagaaggacagtatttggtatctgcgctctgctgaagccagttaccttcggaaaaagagttggtagctcttgatccggcaaacaaaccaccgctggtagcggtggtttttttgtttgcaagcagcagattacgcgcagaaaaaaaggatctcaagaagatcctttgatcttttctactgcagaagcttgttagacaccctgtcatgtattttatattatttatttcaccatacggattaagtgaaacctaatgaaaatagtactttcggagctttaactttaatgaaggtatgtttttttatagacatcgatgtctggtttaacaataggaaaaagtagctaaaactcccatgaattaaagaaataacaaggtgtctaacaacctgttattaagaatgttagaaaagacttaacatttgtgttgagtttttatagacattggtgtctagacatacggtagataaggtttgctcaaaaataaaataaaaaaagattggactaaaaaacatttaatttagtacaatttaattagttattttttcgtctcaaattttgctttgttgagcagaaatttagataaaaaaatccccgtgatcagattacaatgtcgttcattgtacgatgtgtcgaaaaatctttacgacactctaaactgaccacacgggggaaaaagaaaactgaactaataacatcatgatactcggaaaacctagcaattctcaacccctaaacaaaagaaacttccaaaaccctgaccatataaaggagtggcaacaatcagcaatcagtcaagatttgatagcagaaaatcttgtatcggttgctaatggttttgatgtactatttatcggcaataaataccgaactaacacgggtgttctgtcacggcacatattaaactcctattctcatttagaagatggtggttcgtatggtagaacatttgacccatttaccaataaagaaatgcagtgggttcaatttaaaccgaatagaccaagaaaaggttctactggtaaggtaatcaaatatgaatcgccaaaaggtgaacctacaagagttctaatgccgtttgtgcctatgaaaatatggcaacggattagcgataagttcggagtaccgattaatccgaaaaaagatactcacttttgggaatgggtaaagaataatccatcgataccgattgccattacagaaggaaataaaaaagctaattgcctattatcctatggctatcctgctattgcctttgtaggcatttggaacggattagagaaaataaatgatttctcgaaggaaaagcagttaaaagaggatttgaaatggttgttatccaacggcaaccgaaatattaatatcatctttgaccaagaccagaaacaaaaaactgtaattaatgtaaacaaagctattttcgctttatcttctctaataagtagaaatggtcataaagttaatattgtgcaatggttgccgtcaaaaggtaaaggaatagatgattatttggtagctttaccttttgagaaaagagaaaatcatttagacaacttaattaaaattgcaccatcatttaatttttggtcaactaaatacttattcaagtgtcgtaaaccagatttaaccgtaaattgccgttatttgagcgatgcagtaaaagaattacctcaagaggatatagcattaatagcacctcacggcacgggtaaaacttcattagtagctactcacgttaagaatcggagttatcacggaaggaaaactatttcattggtgcatcttgaaagtttagccaaagctaatggcaacgcacttggattatattaccgaaccgaaaataatattgaaaagcaatatcttggatttagcttatgtgtagatagttgccgtgataagattaacggcattacaactgatattatttcaggtcaagattattgccttttcattgatgaaattgaccaagtaattccacacatccttaacagtgaaactgaagtaagtaagtatagatgcaccatcattgacactttttctgaactggtgagaaatgctgaacaggtcattattgctgatgctgatttatccgatgtgacgattgacctaatagaaaacatcagaggtaaaaaactatatgtaatcaagaatgaatatcagtatcagggaatgacttttaacgccgttggttcaccattagaaatgatggcaatgatgggaaaatcggtgtcagaaggcaagaaattatttattaacaccacatcccaaaaggcaaaaagtaagtacggcacaatcgctcttgagtcttatatttttggtctaaataaagaagcaaagatattaagaatagactctgaaaccactaaaaaccctgaacatccagcctataaaatcattgaccaagacttaaataatatcctcaaagattatgattatgtcattgcctcaccttgccttcaaacaggtgtcagtattaccttaaaagggcattttgaccagcaatttaacttttccagtggaaacattacacctcattgctttttacagcaaatgtggcggttgagggatgcagaaattgaaagattctattatgtgccgaactcatctaacctcaatctcattgggaataagtcaagttcaccatcagaccttctaaagagcaataacaagatggcaacggcaacggttaaccttttgggtagaatcgactccgaatattccctagagtatgaatcgcacggcatttggcttgagacgtgggcaaaattatcagcacggcataacagttcaatgcgttgttactctgaaattcttacctatctaattacgtctcaagggcataaattaaatatcaacattccctcacctcttgcagatattaagaagctaaatgatgaggtaagtagtaacagggaaaaggtaaaaaatgagagatactctcagaggttaaactcaccagatattaacgatgcagaagctaccatactcgaatctaaagagcaaaaaatcggattgactctcaatgagagatgcaccctagaaaagcataaagttaagaagcggtatgggaatgtaaagatggatattctcacctttgatgatgatggactataccccaaactcagactattttattacctcaccatcggtaaacctcatctcaaggctaatgacagaaaagctattgccaaaatgggcaatgacaataaaggcaagattctatcaaaagacttagttaataaaacttactccgctcgtgtgaaggtcttagagattcttaaactaactgactttatcgacaatcttagagatgaactcttaataactcccaataatccagctatcaccgattttaataatcttctgctaagagctaagaaggatttaagagtattaggagtcaacatcggaaaatatccaatggccaacattaatgccgtacttactctcattggtcacaaactttctgtaatgagagatgagttcggaaaagagaaaaggataaaagtagatggtaaatcataccgatgttatcaacttgaaacattaccagattttaccaatgatactcttgactactggttagaaaatgatagccaaaaagaagtaacagcaacagaaaattactccgaaaattttaacccttcaaatagctacaatccagacagtaagacactttcagagggtgcaaatttcctatatataaataaagaagaattgcatccaaataaattgcacctagaaataaaagaaggtgctgaactttttttattcggggtaaaggtgattgtgaaaggaatcttggacggggcagtaactatattctctatgggtcaagaatacgatttatccctcaatgaactagaggggatgttaacatcatgaactttacaagaatctttttaaagggcgatcgcaccatgttaaatgatggtacatttgttcagatatttgatatttaccatgaccacgcattgggagtgacccttgaccttaagacagaaaaaattatttccgatgatgttagggtaattactgtcaaagacttattgttcgatggcacttataaaggggtaaaatcttttatgcccgataatgcccgataatgcccgattgatgctacaaaatcccataatcataagcgataatcccctaatagcttgtaattcttgaaccgtagcgattttagagtattccaaaaagaagaaataaacaccgcaaaatgtcgtatttcacatatataaaccaaggttttttgccctaaaatctttatgtttgtagtgtgatgttgggtcaaaatggtcagaaaagttgcaaggtttttatggatgcttacgcgcgcgaggggtaagcatccccaaatagttactttatcctagtccatgcccatttattgccgtcccgttcggctttaaaaaagtgccaaaactcacaaggtgcaataaaaagttctgtacctttcgcaaccctagataatctttcaacagttactttttttcctattatctcggtacaaagtttggctagtttctcttttccctctttttcaatcaagccttcttgtatgcccaactcattgattaatctctctatttttaccattatttcccgttcaggtagtttatcccctaaatcttcatcggggggcaatgtagggcattctgaaggggctttttcttctgtctggacattatctaatattgaagtaaccaaactatcttcagttttttctattcctattaattcatattcggttactgtatccgtatcaatatccgaataactatctttatccgtattagctattcggttaagtttatccgttaactcagaaacaagactatatagcggttttagcttttcttctatcctgttatctaatacggataagtttatacggttatcattatccgtattagtatcattgggcttttttggtagttctaccccctcataaaccgcttttattcccaattccaacagactgataacagtatcctttataatgggttttttgctgatatggtgaacttttgccccttccatcattgcgatactttctatctcactcatcaacttatcgcttaagtgaatctcgtatctgtttaatcccttactggttttattcatatccgtttactttattcggttaacaattctattttatacgaataaaatattatacggttaactttatacgtttaactattttatctatacggataacagtaataagttattcgtattagttatacgtttacttttatccaaataaaattagtgcatttaaactaaaagaatgattttatcggagttgatagcattggattaacctaaagatgtttataagctatatctgataagtatttaaggttattttgttattctgtttattgacattatcagaataaaagaatagaatataattgttgagagataagaggtttaagtgattatggttaagaagttagttggttatgtcagggtcagtagtgaatcgcaagaggataacactagcttacagaatcagatagagagaattgaagcatattgtatggcttttggttatgagttggtaaaaatattcaaagaggttgccactggtacaaaagcagatattgaaacccgtcctatttttaatgaagctatagaatacttgaaacaggataatgctaatggaattattgccttgaagctagaccgaatcgcacggaatgctttagatgtattgcgtttggttcgtgaaaccttagaaccacaaaataaaatgttagtgttactagatattcaggtagatacttcgacaccttcaggaaaaatgattttaactgtaatgagtgccgttgctgaactcgaaagagacatgatctatgatcgcactcaggggggtagaaagactaaagcccaaaagggcgggtatgcctacgggaaacctaaatttggctataagactgaagaaaaggaactaaaagaagattcagcacaacaggaaactattaaactaattaagagacaccgtaggtcagggaaaagctaccagaaaatagctgattatctcaatgcccaaagtattcccactaaacaaggtaagaaatggagttctagcgtcgtctatcgaatctgtcaggaaaaagctggttaagtctgtttatagatatttagaatttattgaataaaaatagtatgaacaataaatatttatggactaaccacgctcggaaacgtttaactgaacgatgggaaataaaagaatcatgggttattgataccatcgaaaatcctgaacgttcagaatttattgttgatgagtcaggggaaaaatatcattactataaaagaatagctaagtttaagaatagagtgttagaagtgataacttctgccaactcaacacccacaagaataataaccttttactttaaccgtaacatgaggaaaaatttatgattgttacttacgataatgaagttgacgcaatttattttaagttaacggaaaataaaattgatagcaccgaacctcaaacagacaggattatcattgattacgatgaaagtaataatattgttggcattgaggtattagattttaattatcttgtcaagaaaggtttaaccgttgctgatttacctttttctgaagatgaaagattaacagcttctcaatattttaattttcctgttgctatctaatccagaaggggcaataatccccttctttcatcgagttagacttaatatcacaaaagtcattttcattttaccgtttcttttccacagcgtccgtacgcccctcgttaaatctcaaaaccgacaatttatgatgtttataaaaagttactcactttaataagtatttatactcattaaagggttattctttttttgtagcctgataggttgggaaggaatatttcagattatcagatttgttgaatatttt

SEQ ID NO: 57 - DNA, 12973 bp, Cyanobacterium sp. ABICyano1
tcgacgggcaaactttatgaagcagatcaagcctatatccgccaagcaaccggcagccgcgttgattagtgggtgtgtccatcctctggttcgtctaggtgctccgaagcgtcacgatagagattaagaatgtggtgatccttgaggcgataaatcacattccgcccttccttgcgatagctcactaaacgtgctgtgcgcagggttcttagttggtgagagacagccgattcactcatttcaacggcggcggcgagttcccccacccgcatctctccagtggccagggccgaaagaatacgccagcggttggcatcccccaagacaccaaaaaattcggccatccgttgggccttggcttggttcaagattttgccactgtggtctgtcattgttcgctgatctaaacaatacctgaataattgttcatgtgttaatctaaaaatgtgaacaatcgttcaactatttaagacaataccaaggaggtgataaccatgaattcttataccgtgggtacttatttagccgaacgcttagtgcaaattggtttaaaacatcattttgccgtggctggggactataatttagtgttattggataacttattattaaataaaaacatggaacaagtgtattgttgtaatgaattaaattgtggtttttctgctgaaggttatgctagagctaaaggtgcagctgctgctgttgttacttattctgtgggtgctttatctgcttttgatgctattggtggtgcttatgccgaaaatttacccgtgattttaatttctggtgcccctaataataatgatcatgccgctggacatgttttacatcatgccttaggtaaaaccgattatcattatcaattagaaatggccaaaaatattactgctgctgccgaagctatttatactcctgaagaagcccctgccaaaattgatcatgtgattaaaaccgccttacgcgaaaaaaaacccgtgtatttagaaattgcctgtaatattgcttctatgccttgtgctgctcctgggcctgcttctgctttatttaatgatgaagcctctgatgaagctagtttaaatgctgccgtggaagaaaccttaaaatttattgccaatcgcgataaagttgccgtgttagttggttctaaattaagagctgctggtgctgaagaagctgctgttaaatttgctgatgctttaggtggtgcagttgctactatggctgctgccaaatctttttttcccgaagaaaatccccattatattggaactagttggggagaagtttcttatcctggtgtggaaaaaactatgaaagaagccgacgctgttattgctttagcccctgtgtttaatgattattctaccactggttggactgatattcccgatcccaaaaaattagttttagccgaacctcgttctgttgttgttaatggtgttcgctttccctctgtgcatttaaaagattatttaacccgcttagcccaaaaagtttctaaaaaaactggtgccttagatttttttaaatctttaaatgcgggtgaattaaaaaaagctgctcctgctgatccttctgctcctttagttaatgctgaaattgcccgtcaagttgaagccttattaacccctaatactaccgttattgccgaaactggtgattcttggtttaatgcccaacgcatgaaattacctaatggtgcccgtgttgaatatgaaatgcaatggggtcatattggttggtctgtacctgctgcttttggttatgctgttggtgctcctgaacgtcgtaatattttaatggtgggtgatggttcttttcaattaactgcccaagaagttgcccaaatggttcgcttaaaattacccgttattatttttttaataaataattatggttataccattgaagtgatgattcatgatgggccatataataatattaaaaattgggattatgcgggtttaatggaagtgtttaatggtaatggtggttatgattctggtgctggtaaaggtttaaaagccaaaactggtggtgaattagctgaagctattaaagttgccttagccaatactgatgggccaaccttaattgaatgttttattggtcgcgaagattgtaccgaagaattagttaaatggggtaaacgtgttgctgctgctaattctcgcaaacccgtgaataaattattgtaatttttggggatcaattcgagctcagcaagtttcatcccgaccccctcagggtcgggatttttttattgtactagttgacataagtaaaggcatcccctgcgtgatataattaccttcagtttaaggaggtatacacatatgattaaagcctatgctgccttagaagccaatggtaaattacaaccctttgaatatgatcctggtgctttaggtgccaatgaagtggaaattgaagtgcaatattgtggtgtgtgtcattctgatttatctatgattaataatgaatggggtatttctaattatcccttagttcctggtcatgaagttgttggtactgttgctgctatgggtgaaggtgttaatcatgtggaagtgggtgatttagttggtttaggttggcattctggttattgtatgacctgtcattcttgtttatctggttatcataatttatgtgccactgccgaatctactattgtgggtcattatggtggttttggtgatagagttcgtgctaaaggtgtttctgtggtgaaattacccaaaggtattgatttagcctctgctgggcctttattttgtggtggtattaccgttttttctcccatggtggaattatctttaaaacctaccgccaaagttgctgttattggtattggtggtttaggtcatttagccgttcaatttttaagagcctggggttgtgaagttactgcttttacctcttctgcccgtaaacaaaccgaagttttagaattaggtgcccatcatattttagattctaccaatcctgaagctattgcttctgccgaaggtaaatttgattatattatttctaccgtgaatttaaaattagattggaatttatatatcagtaccttagcccctcaaggtcattttcattttgttggtgtggtgttagaacccttggacttaaacttatttcccttattaatgggacaacgttctgtttctgcttctcctgttggttctcctgctactattgccactatgttagattttgccgtgcgtcatgatattaaacccgtggtggaacaattttcttttgatcaaattaatgaagccattgcccatttagaatctggtaaagcccattatcgcgtggtgttatctcattctaaaaattaataagattaacttctaaactgaaacaaatttgagggtaggcttcattgtctgcccttatttttttatttaggaaaagtgaacagactaaagagtgttggctctattgctttgagtatgtaaattaggcgttgctgaattaaggtatgatttttgaccccttctctcttctgcaggatcatcttgctgaaaaactcgagcgctcgttccgcaaagcggtacggagttagttaggggctaatgggcattctcccgtacaggaaagagttagaagttattaattatcaacaattctcctttgcctagtgcatcgttacctttttaattaaaacataaggaaaactaataatcgtaataatttaacctcaaagtgtaaagaaatgtgaaattctgacttttataacgttaaagagggaaaaattagcagtttaaaatacctagagaatagtctggggtaagcatagagaattagattagttaagttaatcaaattcagaaaaaataataatcgtaaatagttaatctgggtgtatagaaaatgatccccttcatgataagatttaaactcgaaaagcaaaagccaaaaaactaacttccattaaaagaagttgttacatataacgctataaagaaaatttatatatttggaggataccaaccatgtctcatattcaacgtgaaactagttgttctcgccctcgtttaaattctaatatggatgccgatttatatggttataaatgggctcgtgataatgttggtcaatctggtgctactatttatcgtttatatggtaaacctgatgctcctgaattattcttgaaacatggtaaaggttctgttgctaatgatgttactgatgaaatggttcgtttaaactggttgactgaatttatgcctttacctactattaaacattttattcgtactcccgatgatgcttggttattaactactgctattcctggtaaaactgcttttcaagttttagaagaatatcctgattctggtgaaaatattgttgatgctttagctgtttttttacgtcgtttacattctattcccgtttgtaattgtccttttaattctgatcgtgtttttcgtttagctcaagctcaatctcgtatgaataatggtttagttgatgcttctgattttgatgatgaacgtaatggttggcctgttgaacaagtttggaaagaaatgcacaaattgttacctttttctcctgattctgttgttactcatggtgatttttctttagataatttgatctttgatgaaggtaaattgattggttgtattgatgttggtcgtgttggtattgctgatcgttatcaagatttagctattttatggaattgtttaggtgaattttctccttctttacagaaacgtttatttcagaaatatggtattgataatcctgatatgaacaagttacaatttcatttaatgttggacgagttcttttaagaattaattcatgaccaaaatcccttaacgtgagttttcgttccactgagcgtcagaccccgtagaaaagatcaaaggatcttcttgagatcctttttttctgcgcgtaatctgctgctatttaaattacgtacacgtgttattactttgttaacgacaattgtcttaattaactgggcctcatgggccttccgctcactgcccgctttccagtcgggaaacctgtcgtgccagctctgcagatgacggtgaaaacctctgacacatgcagctcccggagacggtcacagcttgtctgtaagcggatgccgggagcagacaagcccgtcagggcgcgtcagcgggtgttggcgggtgtcggggcgcagccatgacccagtcacgtagcgatagcggagtgtatactggcttaactatgcggcatcagagcagattgtactgagagtgcaccatatgcggtgtgaaataccgcacagatgcgtaaggagaaaataccgcatcaggcgctcttccgcttcctcgctcactgactcgctgcgctcggtcgttcggctgcggcgagcggtatcagctcactcaaaggcggtaatacggttatccacagaatcaggggataacgcaggaaagaacatgtgagcaaaaggccagcaaaaggccaggaaccgtaaaaaggccgcgttgctggcgtttttccataggctccgcccccctgacgagcatcacaaaaatcgacgctcaagtcagaggtggcgaaacccgacaggactataaagataccaggcgtttccccctggaagctccctcgtgcgctctcctgttccgaccctgccgcttaccggatacctgtccgcctttctcccttcgggaagcgtggcgctttctcatagctcacgctgtaggtatctcagttcggtgtaggtcgttcgctccaagctgggctgtgtgcacgaaccccccgttcagcccgaccgctgcgccttatccggtaactatcgtcttgagtccaacccggtaagacacgacttatcgccactggcagcagccactggtaacaggattagcagagcgaggtatgtaggcggtgctacagagttcttgaagtggtggcctaactacggctacactagaaggacagtatttggtatctgcgctctgctgaagccagttaccttcggaaaaagagttggtagctcttgatccggcaaacaaaccaccgctggtagcggtggtttttttgtttgcaagcagcagattacgcgcagaaaaaaaggatctcaagaagatcctttgatcttttctactgcagaagcttgttagacaccctgtcatgtattttatattatttatttcaccatacggattaagtgaaacctaatgaaaatagtactttcggagctttaactttaatgaaggtatgtttttttatagacatcgatgtctggtttaacaataggaaaaagtagctaaaactcccatgaattaaagaaataacaaggtgtctaacaacctgttattaagaatgttagaaaagacttaacatttgtgttgagtttttatagacattggtgtctagacatacggtagataaggtttgctcaaaaataaaataaaaaaagattggactaaaaaacatttaatttagtacaatttaattagttattttttcgtctcaaattttgctttgttgagcagaaatttagataaaaaaatccccgtgatcagattacaatgtcgttcattgtacgatgtgtcgaaaaatctttacgacactctaaactgaccacacgggggaaaaagaaaactgaactaataacatcatgatactcggaaaacctagcaattctcaacccctaaacaaaagaaacttccaaaaccctgaccatataaaggagtggcaacaatcagcaatcagtcaagatttgatagcagaaaatcttgtatcggttgctaatggttttgatgtactatttatcggcaataaataccgaactaacacgggtgttctgtcacggcacatattaaactcctattctcatttagaagatggtggttcgtatggtagaacatttgacccatttaccaataaagaaatgcagtgggttcaatttaaaccgaatagaccaagaaaaggttctactggtaaggtaatcaaatatgaatcgccaaaaggtgaacctacaagagttctaatgccgtttgtgcctatgaaaatatggcaacggattagcgataagttcggagtaccgattaatccgaaaaaagatactcacttttgggaatgggtaaagaataatccatcgataccgattgccattacagaaggaaataaaaaagctaattgcctattatcctatggctatcctgctattgcctttgtaggcatttggaacggattagagaaaataaatgatttctcgaaggaaaagcagttaaaagaggatttgaaatggttgttatccaacggcaaccgaaatattaatatcatctttgaccaagaccagaaacaaaaaactgtaattaatgtaaacaaagctattttcgctttatcttctctaataagtagaaatggtcataaagttaatattgtgcaatggttgccgtcaaaaggtaaaggaatagatgattatttggtagctttaccttttgagaaaagagaaaatcatttagacaacttaattaaaattgcaccatcatttaatttttggtcaactaaatacttattcaagtgtcgtaaaccagatttaaccgtaaattgccgttatttgagcgatgcagtaaaagaattacctcaagaggatatagcattaatagcacctcacggcacgggtaaaacttcattagtagctactcacgttaagaatcggagttatcacggaaggaaaactatttcattggtgcatcttgaaagtttagccaaagctaatggcaacgcacttggattatattaccgaaccgaaaataatattgaaaagcaatatcttggatttagcttatgtgtagatagttgccgtgataagattaacggcattacaactgatattatttcaggtcaagattattgccttttcattgatgaaattgaccaagtaattccacacatccttaacagtgaaactgaagtaagtaagtatagatgcaccatcattgacactttttctgaactggtgagaaatgctgaacaggtcattattgctgatgctgatttatccgatgtgacgattgacctaatagaaaacatcagaggtaaaaaactatatgtaatcaagaatgaatatcagtatcagggaatgacttttaacgccgttggttcaccattagaaatgatggcaatgatgggaaaatcggtgtcagaaggcaagaaattatttattaacaccacatcccaaaaggcaaaaagtaagtacggcacaatcgctcttgagtcttatatttttggtctaaataaagaagcaaagatattaagaatagactctgaaaccactaaaaaccctgaacatccagcctataaaatcattgaccaagacttaaataatatcctcaaagattatgattatgtcattgcctcaccttgccttcaaacaggtgtcagtattaccttaaaagggcattttgaccagcaatttaacttttccagtggaaacattacacctcattgctttttacagcaaatgtggcggttgagggatgcagaaattgaaagattctattatgtgccgaactcatctaacctcaatctcattgggaataagtcaagttcaccatcagaccttctaaagagcaataacaagatggcaacggcaacggttaaccttttgggtagaatcgactccgaatattccctagagtatgaatcgcacggcatttggcttgagacgtgggcaaaattatcagcacggcataacagttcaatgcgttgttactctgaaattcttacctatctaattacgtctcaagggcataaattaaatatcaacattccctcacctcttgcagatattaagaagctaaatgatgaggtaagtagtaacagggaaaaggtaaaaaatgagagatactctcagaggttaaactcaccagatattaacgatgcagaagctaccatactcgaatctaaagagcaaaaaatcggattgactctcaatgagagatgcaccctagaaaagcataaagttaagaagcggtatgggaatgtaaagatggatattctcacctttgatgatgatggactataccccaaactcagactattttattacctcaccatcggtaaacctcatctcaaggctaatgacagaaaagctattgccaaaatgggcaatgacaataaaggcaagattctatcaaaagacttagttaataaaacttactccgctcgtgtgaaggtcttagagattcttaaactaactgactttatcgacaatcttagagatgaactcttaataactcccaataatccagctatcaccgattttaataatcttctgctaagagctaagaaggatttaagagtattaggagtcaacatcggaaaatatccaatggccaacattaatgccgtacttactctcattggtcacaaactttctgtaatgagagatgagttcggaaaagagaaaaggataaaagtagatggtaaatcataccgatgttatcaacttgaaacattaccagattttaccaatgatactcttgactactggttagaaaatgatagccaaaaagaagtaacagcaacagaaaattactccgaaaattttaacccttcaaatagctacaatccagacagtaagacactttcagagggtgcaaatttcctatatataaataaagaagaattgcatccaaataaattgcacctagaaataaaagaaggtgctgaactttttttattcggggtaaaggtgattgtgaaaggaatcttggacggggcagtaactatattctctatgggtcaagaatacgatttatccctcaatgaactagaggggatgttaacatcatgaactttacaagaatctttttaaagggcgatcgcaccatgttaaatgatggtacatttgttcagatatttgatatttaccatgaccacgcattgggagtgacccttgaccttaagacagaaaaaattatttccgatgatgttagggtaattactgtcaaagacttattgttcgatggcacttataaaggggtaaaatcttttatgcccgataatgcccgataatgcccgattgatgctacaaaatcccataatcataagcgataatcccctaatagcttgtaattcttgaaccgtagcgattttagagtattccaaaaagaagaaataaacaccgcaaaatgtcgtatttcacatatataaaccaaggttttttgccctaaaatctttatgtttgtagtgtgatgttgggtcaaaatggtcagaaaagttgcaaggtttttatggatgcttacgcgcgcgaggggtaagcatccccaaatagttactttatcctagtccatgcccatttattgccgtcccgttcggctttaaaaaagtgccaaaactcacaaggtgcaataaaaagttctgtacctttcgcaaccctagataatctttcaacagttactttttttcctattatctcggtacaaagtttggctagtttctcttttccctctttttcaatcaagccttcttgtatgcccaactcattgattaatctctctatttttaccattatttcccgttcaggtagtttatcccctaaatcttcatcggggggcaatgtagggcattctgaaggggctttttcttctgtctggacattatctaatattgaagtaaccaaactatcttcagttttttctattcctattaattcatattcggttactgtatccgtatcaatatccgaataactatctttatccgtattagctattcggttaagtttatccgttaactcagaaacaagactatatagcggttttagcttttcttctatcctgttatctaatacggataagtttatacggttatcattatccgtattagtatcattgggcttttttggtagttctaccccctcataaaccgcttttattcccaattccaacagactgataacagtatcctttataatgggttttttgctgatatggtgaacttttgccccttccatcattgcgatactttctatctcactcatcaacttatcgcttaagtgaatctcgtatctgtttaatcccttactggttttattcatatccgtttactttattcggttaacaattctattttatacgaataaaatattatacggttaactttatacgtttaactattttatctatacggataacagtaataagttattcgtattagttatacgtttacttttatccaaataaaattagtgcatttaaactaaaagaatgattttatcggagttgatagcattggattaacctaaagatgtttataagctatatctgataagtatttaaggttattttgttattctgtttattgacattatcagaataaaagaatagaatataattgttgagagataagaggtttaagtgattatggttaagaagttagttggttatgtcagggtcagtagtgaatcgcaagaggataacactagcttacagaatcagatagagagaattgaagcatattgtatggcttttggttatgagttggtaaaaatattcaaagaggttgccactggtacaaaagcagatattgaaacccgtcctatttttaatgaagctatagaatacttgaaacaggataatgctaatggaattattgccttgaagctagaccgaatcgcacggaatgctttagatgtattgcgtttggttcgtgaaaccttagaaccacaaaataaaatgttagtgttactagatattcaggtagatacttcgacaccttcaggaaaaatgattttaactgtaatgagtgccgttgctgaactcgaaagagacatgatctatgatcgcactcaggggggtagaaagactaaagcccaaaagggcgggtatgcctacgggaaacctaaatttggctataagactgaagaaaaggaactaaaagaagattcagcacaacaggaaactattaaactaattaagagacaccgtaggtcagggaaaagctaccagaaaatagctgattatctcaatgcccaaagtattcccactaaacaaggtaagaaatggagttctagcgtcgtctatcgaatctgtcaggaaaaagctggttaagtctgtttatagatatttagaatttattgaataaaaatagtatgaacaataaatatttatggactaaccacgctcggaaacgtttaactgaacgatgggaaataaaagaatcatgggttattgataccatcgaaaatcctgaacgttcagaatttattgttgatgagtcaggggaaaaatatcattactataaaagaatagctaagtttaagaatagagtgttagaagtgataacttctgccaactcaacacccacaagaataataaccttttactttaaccgtaacatgaggaaaaatttatgattgttacttacgataatgaagttgacgcaatttattttaagttaacggaaaataaaattgatagcaccgaacctcaaacagacaggattatcattgattacgatgaaagtaataatattgttggcattgaggtattagattttaattatcttgtcaagaaaggtttaaccgttgctgatttacctttttctgaagatgaaagattaacagcttctcaatattttaattttcctgttgctatctaatccagaaggggcaataatccccttctttcatcgagttagacttaatatcacaaaagtcattttcattttaccgtttcttttccacagcgtccgtacgcccctcgttaaatctcaaaaccgacaatttatgatgtttataaaaagttactcactttaataagtatttatactcattaaagggttattctttttttgtagcctgataggttgggaaggaatatttcagattatcagatttgttgaatatttttcgtcagatacgcaaaccttacaaacataattaacaactgaaactattgatatgtctaggttttagctctatcacaggttggatctg

SEQ ID NO: 58 - DNA, 12973 bp, Cyanobacterium sp. ABICyano1
tcgacgggcaaactttatgaagcagatcaagcctatatccgccaagcaaccggcagccgcgttgattagtgggtgtgtccatcctctggttcgtctaggtgctccgaagcgtcacgatagagattaagaatgtggtgatccttgaggcgataaatcacattccgcccttccttgcgatagctcactaaacgtgctgtgcgcagggttcttagttggtgagagacagccgattcactcatttcaacggcggcggcgagttcccccacccgcatctctccagtggccagggccgaaagaatacgccagcggttggcatcccccaagacaccaaaaaattcggccatccgttgggccttggcttggttcaagattttgccactgtggtctgtcattgttcgctgatctaaacaatacctgaataattgttcatgtgttaatctaaaaatgtgaacaatcgttcaactatttaagacaataccaaggaggtataaaccatgaattcttataccgtgggtacttatttagccgaacgcttagtgcaaattggtttaaaacatcattttgccgtggctggggactataatttagtgttattggataacttattattaaataaaaacatggaacaagtgtattgttgtaatgaattaaattgtggtttttctgctgaaggttatgctagagctaaaggtgcagctgctgctgttgttacttattctgtgggtgctttatctgcttttgatgctattggtggtgcttatgccgaaaatttacccgtgattttaatttctggtgcccctaataataatgatcatgccgctggacatgttttacatcatgccttaggtaaaaccgattatcattatcaattagaaatggccaaaaatattactgctgctgccgaagctatttatactcctgaagaagcccctgccaaaattgatcatgtgattaaaaccgccttacgcgaaaaaaaacccgtgtatttagaaattgcctgtaatattgcttctatgccttgtgctgctcctgggcctgcttctgctttatttaatgatgaagcctctgatgaagctagtttaaatgctgccgtggaagaaaccttaaaatttattgccaatcgcgataaagttgccgtgttagttggttctaaattaagagctgctggtgctgaagaagctgctgttaaatttgctgatgctttaggtggtgcagttgctactatggctgctgccaaatctttttttcccgaagaaaatccccattatattggaactagttggggagaagtttcttatcctggtgtggaaaaaactatgaaagaagccgacgctgttattgctttagcccctgtgtttaatgattattctaccactggttggactgatattcccgatcccaaaaaattagttttagccgaacctcgttctgttgttgttaatggtgttcgctttccctctgtgcatttaaaagattatttaacccgcttagcccaaaaagtttctaaaaaaactggtgccttagatttttttaaatctttaaatgcgggtgaattaaaaaaagctgctcctgctgatccttctgctcctttagttaatgctgaaattgcccgtcaagttgaagccttattaacccctaatactaccgttattgccgaaactggtgattcttggtttaatgcccaacgcatgaaattacctaatggtgcccgtgttgaatatgaaatgcaatggggtcatattggttggtctgtacctgctgcttttggttatgctgttggtgctcctgaacgtcgtaatattttaatggtgggtgatggttcttttcaattaactgcccaagaagttgcccaaatggttcgcttaaaattacccgttattatttttttaataaataattatggttataccattgaagtgatgattcatgatgggccatataataatattaaaaattgggattatgcgggtttaatggaagtgtttaatggtaatggtggttatgattctggtgctggtaaaggtttaaaagccaaaactggtggtgaattagctgaagctattaaagttgccttagccaatactgatgggccaaccttaattgaatgttttattggtcgcgaagattgtaccgaagaattagttaaatggggtaaacgtgttgctgctgctaattctcgcaaacccgtgaataaattattgtaatttttggggatcaattcgagctcagcaagtttcatcccgaccccctcagggtcgggatttttttattgtactagttgacataagtaaaggcatcccctgcgtgatataattaccttcagtttaaggaggtatacacatatgattaaagcctatgctgccttagaagccaatggtaaattacaaccctttgaatatgatcctggtgctttaggtgccaatgaagtggaaattgaagtgcaatattgtggtgtgtgtcattctgatttatctatgattaataatgaatggggtatttctaattatcccttagttcctggtcatgaagttgttggtactgttgctgctatgggtgaaggtgttaatcatgtggaagtgggtgatttagttggtttaggttggcattctggttattgtatgacctgtcattcttgtttatctggttatcataatttatgtgccactgccgaatctactattgtgggtcattatggtggttttggtgatagagttcgtgctaaaggtgtttctgtggtgaaattacccaaaggtattgatttagcctctgctgggcctttattttgtggtggtattaccgttttttctcccatggtggaattatctttaaaacctaccgccaaagttgctgttattggtattggtggtttaggtcatttagccgttcaatttttaagagcctggggttgtgaagttactgcttttacctcttctgcccgtaaacaaaccgaagttttagaattaggtgcccatcatattttagattctaccaatcctgaagctattgcttctgccgaaggtaaatttgattatattatttctaccgtgaatttaaaattagattggaatttatatatcagtaccttagcccctcaaggtcattttcattttgttggtgtggtgttagaacccttggacttaaacttatttcccttattaatgggacaacgttctgtttctgcttctcctgttggttctcctgctactattgccactatgttagattttgccgtgcgtcatgatattaaacccgtggtggaacaattttcttttgatcaaattaatgaagccattgcccatttagaatctggtaaagcccattatcgcgtggtgttatctcattctaaaaattaataagattaacttctaaactgaaacaaatttgagggtaggcttcattgtctgcccttatttttttatttaggaaaagtgaacagactaaagagtgttggctctattgctttgagtatgtaaattaggcgttgctgaattaaggtatgatttttgaccccttctctcttctgcaggatcatcttgctgaaaaactcgagcgctcgttccgcaaagcggtacggagttagttaggggctaatgggcattctcccgtacaggaaagagttagaagttattaattatcaacaattctcctttgcctagtgcatcgttacctttttaattaaaacataaggaaaactaataatcgtaataatttaacctcaaagtgtaaagaaatgtgaaattctgacttttataacgttaaagagggaaaaattagcagtttaaaatacctagagaatagtctggggtaagcatagagaattagattagttaagttaatcaaattcagaaaaaataataatcgtaaatagttaatctgggtgtatagaaaatgatccccttcatgataagatttaaactcgaaaagcaaaagccaaaaaactaacttccattaaaagaagttgttacatataacgctataaagaaaatttatatatttggaggataccaaccatgtctcatattcaacgtgaaactagttgttctcgccctcgtttaaattctaatatggatgccgatttatatggttataaatgggctcgtgataatgttggtcaatctggtgctactatttatcgtttatatggtaaacctgatgctcctgaattattcttgaaacatggtaaaggttctgttgctaatgatgttactgatgaaatggttcgtttaaactggttgactgaatttatgcctttacctactattaaacattttattcgtactcccgatgatgcttggttattaactactgctattcctggtaaaactgcttttcaagttttagaagaatatcctgattctggtgaaaatattgttgatgctttagctgtttttttacgtcgtttacattctattcccgtttgtaattgtccttttaattctgatcgtgtttttcgtttagctcaagctcaatctcgtatgaataatggtttagttgatgcttctgattttgatgatgaacgtaatggttggcctgttgaacaagtttggaaagaaatgcacaaattgttacctttttctcctgattctgttgttactcatggtgatttttctttagataatttgatctttgatgaaggtaaattgattggttgtattgatgttggtcgtgttggtattgctgatcgttatcaagatttagctattttatggaattgtttaggtgaattttctccttctttacagaaacgtttatttcagaaatatggtattgataatcctgatatgaacaagttacaatttcatttaatgttggacgagttcttttaagaattaattcatgaccaaaatcccttaacgtgagttttcgttccactgagcgtcagaccccgtagaaaagatcaaaggatcttcttgagatcctttttttctgcgcgtaatctgctgctatttaaattacgtacacgtgttattactttgttaacgacaattgtcttaattaactgggcctcatgggccttccgctcactgcccgctttccagtcgggaaacctgtcgtgccagctctgcagatgacggtgaaaacctctgacacatgcagctcccggagacggtcacagcttgtctgtaagcggatgccgggagcagacaagcccgtcagggcgcgtcagcgggtgttggcgggtgtcggggcgcagccatgacccagtcacgtagcgatagcggagtgtatactggcttaactatgcggcatcagagcagattgtactgagagtgcaccatatgcggtgtgaaataccgcacagatgcgtaaggagaaaataccgcatcaggcgctcttccgcttcctcgctcactgactcgctgcgctcggtcgttcggctgcggcgagcggtatcagctcactcaaaggcggtaatacggttatccacagaatcaggggataacgcaggaaagaacatgtgagcaaaaggccagcaaaaggccaggaaccgtaaaaaggccgcgttgctggcgtttttccataggctccgcccccctgacgagcatcacaaaaatcgacgctcaagtcagaggtggcgaaacccgacaggactataaagataccaggcgtttccccctggaagctccctcgtgcgctctcctgttccgaccctgccgcttaccggatacctgtccgcctttctcccttcgggaagcgtggcgctttctcatagctcacgctgtaggtatctcagttcggtgtaggtcgttcgctccaagctgggctgtgtgcacgaaccccccgttcagcccgaccgctgcgccttatccggtaactatcgtcttgagtccaacccggtaagacacgacttatcgccactggcagcagccactggtaacaggattagcagagcgaggtatgtaggcggtgctacagagttcttgaagtggtggcctaactacggctacactagaaggacagtatttggtatctgcgctctgctgaagccagttaccttcggaaaaagagttggtagctcttgatccggcaaacaaaccaccgctggtagcggtggtttttttgtttgcaagcagcagattacgcgcagaaaaaaaggatctcaagaagatcctttgatcttttctactgcagaagcttgttagacaccctgtcatgtattttatattatttatttcaccatacggattaagtgaaacctaatgaaaatagtactttcggagctttaactttaatgaaggtatgtttttttatagacatcgatgtctggtttaacaataggaaaaagtagctaaaactcccatgaattaaagaaataacaaggtgtctaacaacctgttattaagaatgttagaaaagacttaacatttgtgttgagtttttatagacattggtgtctagacatacggtagataaggtttgctcaaaaataaaataaaaaaagattggactaaaaaacatttaatttagtacaatttaattagttattttttcgtctcaaattttgctttgttgagcagaaatttagataaaaaaatccccgtgatcagattacaatgtcgttcattgtacgatgtgtcgaaaaatctttacgacactctaaactgaccacacgggggaaaaagaaaactgaactaataacatcatgatactcggaaaacctagcaattctcaacccctaaacaaaagaaacttccaaaaccctgaccatataaaggagtggcaacaatcagcaatcagtcaagatttgatagcagaaaatcttgtatcggttgctaatggttttgatgtactatttatcggcaataaataccgaactaacacgggtgttctgtcacggcacatattaaactcctattctcatttagaagatggtggttcgtatggtagaacatttgacccatttaccaataaagaaatgcagtgggttcaatttaaaccgaatagaccaagaaaaggttctactggtaaggtaatcaaatatgaatcgccaaaaggtgaacctacaagagttctaatgccgtttgtgcctatgaaaatatggcaacggattagcgataagttcggagtaccgattaatccgaaaaaagatactcacttttgggaatgggtaaagaataatccatcgataccgattgccattacagaaggaaataaaaaagctaattgcctattatcctatggctatcctgctattgcctttgtaggcatttggaacggattagagaaaataaatgatttctcgaaggaaaagcagttaaaagaggatttgaaatggttgttatccaacggcaaccgaaatattaatatcatctttgaccaagaccagaaacaaaaaactgtaattaatgtaaacaaagctattttcgctttatcttctctaataagtagaaatggtcataaagttaatattgtgcaatggttgccgtcaaaaggtaaaggaatagatgattatttggtagctttaccttttgagaaaagagaaaatcatttagacaacttaattaaaattgcaccatcatttaatttttggtcaactaaatacttattcaagtgtcgtaaaccagatttaaccgtaaattgccgttatttgagcgatgcagtaaaagaattacctcaagaggatatagcattaatagcacctcacggcacgggtaaaacttcattagtagctactcacgttaagaatcggagttatcacggaaggaaaactatttcattggtgcatcttgaaagtttagccaaagctaatggcaacgcacttggattatattaccgaaccgaaaataatattgaaaagcaatatcttggatttagcttatgtgtagatagttgccgtgataagattaacggcattacaactgatattatttcaggtcaagattattgccttttcattgatgaaattgaccaagtaattccacacatccttaacagtgaaactgaagtaagtaagtatagatgcaccatcattgacactttttctgaactggtgagaaatgctgaacaggtcattattgctgatgctgatttatccgatgtgacgattgacctaatagaaaacatcagaggtaaaaaactatatgtaatcaagaatgaatatcagtatcagggaatgacttttaacgccgttggttcaccattagaaatgatggcaatgatgggaaaatcggtgtcagaaggcaagaaattatttattaacaccacatcccaaaaggcaaaaagtaagtacggcacaatcgctcttgagtcttatatttttggtctaaataaagaagcaaagatattaagaatagactctgaaaccactaaaaaccctgaacatccagcctataaaatcattgaccaagacttaaataatatcctcaaagattatgattatgtcattgcctcaccttgccttcaaacaggtgtcagtattaccttaaaagggcattttgaccagcaatttaacttttccagtggaaacattacacctcattgctttttacagcaaatgtggcggttgagggatgcagaaattgaaagattctattatgtgccgaactcatctaacctcaatctcattgggaataagtcaagttcaccatcagaccttctaaagagcaataacaagatggcaacggcaacggttaaccttttgggtagaatcgactccgaatattccctagagtatgaatcgcacggcatttggcttgagacgtgggcaaaattatcagcacggcataacagttcaatgcgttgttactctgaaattcttacctatctaattacgtctcaagggcataaattaaatatcaacattccctcacctcttgcagatattaagaagctaaatgatgaggtaagtagtaacagggaaaaggtaaaaaatgagagatactctcagaggttaaactcaccagatattaacgatgcagaagctaccatactcgaatctaaagagcaaaaaatcggattgactctcaatgagagatgcaccctagaaaagcataaagttaagaagcggtatgggaatgtaaagatggatattctcacctttgatgatgatggactataccccaaactcagactattttattacctcaccatcggtaaacctcatctcaaggctaatgacagaaaagctattgccaaaatgggcaatgacaataaaggcaagattctatcaaaagacttagttaataaaacttactccgctcgtgtgaaggtcttagagattcttaaactaactgactttatcgacaatcttagagatgaactcttaataactcccaataatccagctatcaccgattttaataatcttctgctaagagctaagaaggatttaagagtattaggagtcaacatcggaaaatatccaatggccaacattaatgccgtacttactctcattggtcacaaactttctgtaatgagagatgagttcggaaaagagaaaaggataaaagtagatggtaaatcataccgatgttatcaacttgaaacattaccagattttaccaatgatactcttgactactggttagaaaatgatagccaaaaagaagtaacagcaacagaaaattactccgaaaattttaacccttcaaatagctacaatccagacagtaagacactttcagagggtgcaaatttcctatatataaataaagaagaattgcatccaaataaattgcacctagaaataaaagaaggtgctgaactttttttattcggggtaaaggtgattgtgaaaggaatcttggacggggcagtaactatattctctatgggtcaagaatacgatttatccctcaatgaactagaggggatgttaacatcatgaactttacaagaatctttttaaagggcgatcgcaccatgttaaatgatggtacatttgttcagatatttgatatttaccatgaccacgcattgggagtgacccttgaccttaagacagaaaaaattatttccgatgatgttagggtaattactgtcaaagacttattgttcgatggcacttataaaggggtaaaatcttttatgcccgataatgcccgataatgcccgattgatgctacaaaatcccataatcataagcgataatcccctaatagcttgtaattcttgaaccgtagcgattttagagtattccaaaaagaagaaataaacaccgcaaaatgtcgtatttcacatatataaaccaaggttttttgccctaaaatctttatgtttgtagtgtgatgttgggtcaaaatggtcagaaaagttgcaaggtttttatggatgcttacgcgcgcgaggggtaagcatccccaaatagttactttatcctagtccatgcccatttattgccgtcccgttcggctttaaaaaagtgccaaaactcacaaggtgcaataaaaagttctgtacctttcgcaaccctagataatctttcaacagttactttttttcctattatctcggtacaaagtttggctagtttctcttttccctctttttcaatcaagccttcttgtatgcccaactcattgattaatctctctatttttaccattatttcccgttcaggtagtttatcccctaaatcttcatcggggggcaatgtagggcattctgaaggggctttttcttctgtctggacattatctaatattgaagtaaccaaactatcttcagttttttctattcctattaattcatattcggttactgtatccgtatcaatatccgaataactatctttatccgtattagctattcggttaagtttatccgttaactcagaaacaagactatatagcggttttagcttttcttctatcctgttatctaatacggataagtttatacggttatcattatccgtattagtatcattgggcttttttggtagttctaccccctcataaaccgcttttattcccaattccaacagactgataacagtatcctttataatgggttttttgctgatatggtgaacttttgccccttccatcattgcgatactttctatctcactcatcaacttatcgcttaagtgaatctcgtatctgtttaatcccttactggttttattcatatccgtttactttattcggttaacaattctattttatacgaataaaatattatacggttaactttatacgtttaactattttatctatacggataacagtaataagttattcgtattagttatacgtttacttttatccaaataaaattagtgcatttaaactaaaagaatgattttatcggagttgatagcattggattaacctaaagatgtttataagctatatctgataagtatttaaggttattttgttattctgtttattgacattatcagaataaaagaatagaatataattgttgagagataagaggtttaagtgattatggttaagaagttagttggttatgtcagggtcagtagtgaatcgcaagaggataacactagcttacagaatcagatagagagaattgaagcatattgtatggcttttggttatgagttggtaaaaatattcaaagaggttgccactggtacaaaagcagatattgaaacccgtcctatttttaatgaagctatagaatacttgaaacaggataatgctaatggaattattgccttgaagctagaccgaatcgcacggaatgctttagatgtattgcgtttggttcgtgaaaccttagaaccacaaaataaaatgttagtgttactagatattcaggtagatacttcgacaccttcaggaaaaatgattttaactgtaatgagtgccgttgctgaactcgaaagagacatgatctatgatcgcactcaggggggtagaaagactaaagcccaaaagggcgggtatgcctacgggaaacctaaatttggctataagactgaagaaaaggaactaaaagaagattcagcacaacaggaaactattaaactaattaagagacaccgtaggtcagggaaaagctaccagaaaatagctgattatctcaatgcccaaagtattcccactaaacaaggtaagaaatggagttctagcgtcgtctatcgaatctgtcaggaaaaagctggttaagtctgtttatagatatttagaatttattgaataaaaatagtatgaacaataaatatttatggactaaccacgctcggaaacgtttaactgaacgatgggaaataaaagaatcatgggttattgataccatcgaaaatcctgaacgttcagaatttattgttgatgagtcaggggaaaaatatcattactataaaagaatagctaagtttaagaatagagtgttagaagtgataacttctgccaactcaacacccacaagaataataaccttttactttaaccgtaacatgaggaaaaatttatgattgttacttacgataatgaagttgacgcaatttattttaagttaacggaaaataaaattgatagcaccgaacctcaaacagacaggattatcattgattacgatgaaagtaataatattgttggcattgaggtattagattttaattatcttgtcaagaaaggtttaaccgttgctgatttacctttttctgaagatgaaagattaacagcttctcaatattttaattttcctgttgctatctaatccagaaggggcaataatccccttctttcatcgagttagacttaatatcacaaaagtcattttcattttaccgtttcttttccacagcgtccgtacgcccctcgttaaatctcaaaaccgacaatttatgatgtttataaaaagttactcactttaataagtatttatactcattaaagggttattctttttttgtagcctgataggttgggaaggaatatttcagattatcagatttgttgaatatttttcgtcagatacgcaaaccttacaaacataattaacaactgaaactattgatatgtctaggttttagctctatcacaggttggatctg

SEQ ID NO: 59 - DNA, 12762 bp, Cyanobacterium sp. ABICyano1
tcgacaattaataacttcttcctgtacgggcgaatggccatttgctcctaactaactccgtactgctttgcggaacgagcgtagcgaactctccgaattactaagccttcatccctgatagatgcaaaaaacgaattaaaattatgtgtaaaaagaaaatgtgtctttatttagtagtcaaagttacaaaatattaagaatcaaattaataatgtattgggcagttaagtatataagtctttaaatatttatttgtattcaatatattaaccgaggacaaattatgaattcttataccgtgggtacttatttagccgaacgcttagtgcaaattggtttaaaacatcattttgccgtggctggggactataatttagtgttattggataacttattattaaataaaaacatggaacaagtgtattgttgtaatgaattaaattgtggtttttctgctgaaggttatgctagagctaaaggtgcagctgctgctgttgttacttattctgtgggtgctttatctgcttttgatgctattggtggtgcttatgccgaaaatttacccgtgattttaatttctggtgcccctaataataatgatcatgccgctggacatgttttacatcatgccttaggtaaaaccgattatcattatcaattagaaatggccaaaaatattactgctgctgccgaagctatttatactcctgaagaagcccctgccaaaattgatcatgtgattaaaaccgccttacgcgaaaaaaaacccgtgtatttagaaattgcctgtaatattgcttctatgccttgtgctgctcctgggcctgcttctgctttatttaatgatgaagcctctgatgaagctagtttaaatgctgccgtggaagaaaccttaaaatttattgccaatcgcgataaagttgccgtgttagttggttctaaattaagagctgctggtgctgaagaagctgctgttaaatttgctgatgctttaggtggtgcagttgctactatggctgctgccaaatctttttttcccgaagaaaatccccattatattggaactagttggggagaagtttcttatcctggtgtggaaaaaactatgaaagaagccgacgctgttattgctttagcccctgtgtttaatgattattctaccactggttggactgatattcccgatcccaaaaaattagttttagccgaacctcgttctgttgttgttaatggtgttcgctttccctctgtgcatttaaaagattatttaacccgcttagcccaaaaagtttctaaaaaaactggtgccttagatttttttaaatctttaaatgcgggtgaattaaaaaaagctgctcctgctgatccttctgctcctttagttaatgctgaaattgcccgtcaagttgaagccttattaacccctaatactaccgttattgccgaaactggtgattcttggtttaatgcccaacgcatgaaattacctaatggtgcccgtgttgaatatgaaatgcaatggggtcatattggttggtctgtacctgctgcttttggttatgctgttggtgctcctgaacgtcgtaatattttaatggtgggtgatggttcttttcaattaactgcccaagaagttgcccaaatggttcgcttaaaattacccgttattatttttttaataaataattatggttataccattgaagtgatgattcatgatgggccatataataatattaaaaattgggattatgcgggtttaatggaagtgtttaatggtaatggtggttatgattctggtgctggtaaaggtttaaaagccaaaactggtggtgaattagctgaagctattaaagttgccttagccaatactgatgggccaaccttaattgaatgttttattggtcgcgaagattgtaccgaagaattagttaaatggggtaaacgtgttgctgctgctaattctcgcaaacccgtgaataaattattgtaatttttggggatcaattcgagctcagcaagtttcatcccgaccccctcagggtcgggatttttttattgtactagttgacataagtaaaggcatcccctgcgtgatataattaccttcagtttaaggaggtatacacatatgattaaagcctatgctgccttagaagccaatggtaaattacaaccctttgaatatgatcctggtgctttaggtgccaatgaagtggaaattgaagtgcaatattgtggtgtgtgtcattctgatttatctatgattaataatgaatggggtatttctaattatcccttagttcctggtcatgaagttgttggtactgttgctgctatgggtgaaggtgttaatcatgtggaagtgggtgatttagttggtttaggttggcattctggttattgtatgacctgtcattcttgtttatctggttatcataatttatgtgccactgccgaatctactattgtgggtcattatggtggttttggtgatagagttcgtgctaaaggtgtttctgtggtgaaattacccaaaggtattgatttagcctctgctgggcctttattttgtggtggtattaccgttttttctcccatggtggaattatctttaaaacctaccgccaaagttgctgttattggtattggtggtttaggtcatttagccgttcaatttttaagagcctggggttgtgaagttactgcttttacctcttctgcccgtaaacaaaccgaagttttagaattaggtgcccatcatattttagattctaccaatcctgaagctattgcttctgccgaaggtaaatttgattatattatttctaccgtgaatttaaaattagattggaatttatatatcagtaccttagcccctcaaggtcattttcattttgttggtgtggtgttagaacccttggacttaaacttatttcccttattaatgggacaacgttctgtttctgcttctcctgttggttctcctgctactattgccactatgttagattttgccgtgcgtcatgatattaaacccgtggtggaacaattttcttttgatcaaattaatgaagccattgcccatttagaatctggtaaagcccattatcgcgtggtgttatctcattctaaaaattaataagattaacttctaaactgaaacaaatttgagggtaggcttcattgtctgcccttatttttttatttaggaaaagtgaacagactaaagagtgttggctctattgctttgagtatgtaaattaggcgttgctgaattaaggtatgatttttgaccccttctctcttctgcaggatcatcttgctgaaaaactcgagcgctcgttccgcaaagcggtacggagttagttaggggctaatgggcattctcccgtacaggaaagagttagaagttattaattatcaacaattctcctttgcctagtgcatcgttacctttttaattaaaacataaggaaaactaataatcgtaataatttaacctcaaagtgtaaagaaatgtgaaattctgacttttataacgttaaagagggaaaaattagcagtttaaaatacctagagaatagtctggggtaagcatagagaattagattagttaagttaatcaaattcagaaaaaataataatcgtaaatagttaatctgggtgtatagaaaatgatccccttcatgataagatttaaactcgaaaagcaaaagccaaaaaactaacttccattaaaagaagttgttacatataacgctataaagaaaatttatatatttggaggataccaaccatgtctcatattcaacgtgaaactagttgttctcgccctcgtttaaattctaatatggatgccgatttatatggttataaatgggctcgtgataatgttggtcaatctggtgctactatttatcgtttatatggtaaacctgatgctcctgaattattcttgaaacatggtaaaggttctgttgctaatgatgttactgatgaaatggttcgtttaaactggttgactgaatttatgcctttacctactattaaacattttattcgtactcccgatgatgcttggttattaactactgctattcctggtaaaactgcttttcaagttttagaagaatatcctgattctggtgaaaatattgttgatgctttagctgtttttttacgtcgtttacattctattcccgtttgtaattgtccttttaattctgatcgtgtttttcgtttagctcaagctcaatctcgtatgaataatggtttagttgatgcttctgattttgatgatgaacgtaatggttggcctgttgaacaagtttggaaagaaatgcacaaattgttacctttttctcctgattctgttgttactcatggtgatttttctttagataatttgatctttgatgaaggtaaattgattggttgtattgatgttggtcgtgttggtattgctgatcgttatcaagatttagctattttatggaattgtttaggtgaattttctccttctttacagaaacgtttatttcagaaatatggtattgataatcctgatatgaacaagttacaatttcatttaatgttggacgagttcttttaagaattaattcatgaccaaaatcccttaacgtgagttttcgttccactgagcgtcagaccccgtagaaaagatcaaaggatcttcttgagatcctttttttctgcgcgtaatctgctgctatttaaattacgtacacgtgttattactttgttaacgacaattgtcttaattaactgggcctcatgggccttccgctcactgcccgctttccagtcgggaaacctgtcgtgccagctctgcagatgacggtgaaaacctctgacacatgcagctcccggagacggtcacagcttgtctgtaagcggatgccgggagcagacaagcccgtcagggcgcgtcagcgggtgttggcgggtgtcggggcgcagccatgacccagtcacgtagcgatagcggagtgtatactggcttaactatgcggcatcagagcagattgtactgagagtgcaccatatgcggtgtgaaataccgcacagatgcgtaaggagaaaataccgcatcaggcgctcttccgcttcctcgctcactgactcgctgcgctcggtcgttcggctgcggcgagcggtatcagctcactcaaaggcggtaatacggttatccacagaatcaggggataacgcaggaaagaacatgtgagcaaaaggccagcaaaaggccaggaaccgtaaaaaggccgcgttgctggcgtttttccataggctccgcccccctgacgagcatcacaaaaatcgacgctcaagtcagaggtggcgaaacccgacaggactataaagataccaggcgtttccccctggaagctccctcgtgcgctctcctgttccgaccctgccgcttaccggatacctgtccgcctttctcccttcgggaagcgtggcgctttctcatagctcacgctgtaggtatctcagttcggtgtaggtcgttcgctccaagctgggctgtgtgcacgaaccccccgttcagcccgaccgctgcgccttatccggtaactatcgtcttgagtccaacccggtaagacacgacttatcgccactggcagcagccactggtaacaggattagcagagcgaggtatgtaggcggtgctacagagttcttgaagtggtggcctaactacggctacactagaaggacagtatttggtatctgcgctctgctgaagccagttaccttcggaaaaagagttggtagctcttgatccggcaaacaaaccaccgctggtagcggtggtttttttgtttgcaagcagcagattacgcgcagaaaaaaaggatctcaagaagatcctttgatcttttctactgcagaagcttgttagacaccctgtcatgtattttatattatttatttcaccatacggattaagtgaaacctaatgaaaatagtactttcggagctttaactttaatgaaggtatgtttttttatagacatcgatgtctggtttaacaataggaaaaagtagctaaaactcccatgaattaaagaaataacaaggtgtctaacaacctgttattaagaatgttagaaaagacttaacatttgtgttgagtttttatagacattggtgtctagacatacggtagataaggtttgctcaaaaataaaataaaaaaagattggactaaaaaacatttaatttagtacaatttaattagttattttttcgtctcaaattttgctttgttgagcagaaatttagataaaaaaatccccgtgatcagattacaatgtcgttcattgtacgatgtgtcgaaaaatctttacgacactctaaactgaccacacgggggaaaaagaaaactgaactaataacatcatgatactcggaaaacctagcaattctcaacccctaaacaaaagaaacttccaaaaccctgaccatataaaggagtggcaacaatcagcaatcagtcaagatttgatagcagaaaatcttgtatcggttgctaatggttttgatgtactatttatcggcaataaataccgaactaacacgggtgttctgtcacggcacatattaaactcctattctcatttagaagatggtggttcgtatggtagaacatttgacccatttaccaataaagaaatgcagtgggttcaatttaaaccgaatagaccaagaaaaggttctactggtaaggtaatcaaatatgaatcgccaaaaggtgaacctacaagagttctaatgccgtttgtgcctatgaaaatatggcaacggattagcgataagttcggagtaccgattaatccgaaaaaagatactcacttttgggaatgggtaaagaataatccatcgataccgattgccattacagaaggaaataaaaaagctaattgcctattatcctatggctatcctgctattgcctttgtaggcatttggaacggattagagaaaataaatgatttctcgaaggaaaagcagttaaaagaggatttgaaatggttgttatccaacggcaaccgaaatattaatatcatctttgaccaagaccagaaacaaaaaactgtaattaatgtaaacaaagctattttcgctttatcttctctaataagtagaaatggtcataaagttaatattgtgcaatggttgccgtcaaaaggtaaaggaatagatgattatttggtagctttaccttttgagaaaagagaaaatcatttagacaacttaattaaaattgcaccatcatttaatttttggtcaactaaatacttattcaagtgtcgtaaaccagatttaaccgtaaattgccgttatttgagcgatgcagtaaaagaattacctcaagaggatatagcattaatagcacctcacggcacgggtaaaacttcattagtagctactcacgttaagaatcggagttatcacggaaggaaaactatttcattggtgcatcttgaaagtttagccaaagctaatggcaacgcacttggattatattaccgaaccgaaaataatattgaaaagcaatatcttggatttagcttatgtgtagatagttgccgtgataagattaacggcattacaactgatattatttcaggtcaagattattgccttttcattgatgaaattgaccaagtaattccacacatccttaacagtgaaactgaagtaagtaagtatagatgcaccatcattgacactttttctgaactggtgagaaatgctgaacaggtcattattgctgatgctgatttatccgatgtgacgattgacctaatagaaaacatcagaggtaaaaaactatatgtaatcaagaatgaatatcagtatcagggaatgacttttaacgccgttggttcaccattagaaatgatggcaatgatgggaaaatcggtgtcagaaggcaagaaattatttattaacaccacatcccaaaaggcaaaaagtaagtacggcacaatcgctcttgagtcttatatttttggtctaaataaagaagcaaagatattaagaatagactctgaaaccactaaaaaccctgaacatccagcctataaaatcattgaccaagacttaaataatatcctcaaagattatgattatgtcattgcctcaccttgccttcaaacaggtgtcagtattaccttaaaagggcattttgaccagcaatttaacttttccagtggaaacattacacctcattgctttttacagcaaatgtggcggttgagggatgcagaaattgaaagattctattatgtgccgaactcatctaacctcaatctcattgggaataagtcaagttcaccatcagaccttctaaagagcaataacaagatggcaacggcaacggttaaccttttgggtagaatcgactccgaatattccctagagtatgaatcgcacggcatttggcttgagacgtgggcaaaattatcagcacggcataacagttcaatgcgttgttactctgaaattcttacctatctaattacgtctcaagggcataaattaaatatcaacattccctcacctcttgcagatattaagaagctaaatgatgaggtaagtagtaacagggaaaaggtaaaaaatgagagatactctcagaggttaaactcaccagatattaacgatgcagaagctaccatactcgaatctaaagagcaaaaaatcggattgactctcaatgagagatgcaccctagaaaagcataaagttaagaagcggtatgggaatgtaaagatggatattctcacctttgatgatgatggactataccccaaactcagactattttattacctcaccatcggtaaacctcatctcaaggctaatgacagaaaagctattgccaaaatgggcaatgacaataaaggcaagattctatcaaaagacttagttaataaaacttactccgctcgtgtgaaggtcttagagattcttaaactaactgactttatcgacaatcttagagatgaactcttaataactcccaataatccagctatcaccgattttaataatcttctgctaagagctaagaaggatttaagagtattaggagtcaacatcggaaaatatccaatggccaacattaatgccgtacttactctcattggtcacaaactttctgtaatgagagatgagttcggaaaagagaaaaggataaaagtagatggtaaatcataccgatgttatcaacttgaaacattaccagattttaccaatgatactcttgactactggttagaaaatgatagccaaaaagaagtaacagcaacagaaaattactccgaaaattttaacccttcaaatagctacaatccagacagtaagacactttcagagggtgcaaatttcctatatataaataaagaagaattgcatccaaataaattgcacctagaaataaaagaaggtgctgaactttttttattcggggtaaaggtgattgtgaaaggaatcttggacggggcagtaactatattctctatgggtcaagaatacgatttatccctcaatgaactagaggggatgttaacatcatgaactttacaagaatctttttaaagggcgatcgcaccatgttaaatgatggtacatttgttcagatatttgatatttaccatgaccacgcattgggagtgacccttgaccttaagacagaaaaaattatttccgatgatgttagggtaattactgtcaaagacttattgttcgatggcacttataaaggggtaaaatcttttatgcccgataatgcccgataatgcccgattgatgctacaaaatcccataatcataagcgataatcccctaatagcttgtaattcttgaaccgtagcgattttagagtattccaaaaagaagaaataaacaccgcaaaatgtcgtatttcacatatataaaccaaggttttttgccctaaaatctttatgtttgtagtgtgatgttgggtcaaaatggtcagaaaagttgcaaggtttttatggatgcttacgcgcgcgaggggtaagcatccccaaatagttactttatcctagtccatgcccatttattgccgtcccgttcggctttaaaaaagtgccaaaactcacaaggtgcaataaaaagttctgtacctttcgcaaccctagataatctttcaacagttactttttttcctattatctcggtacaaagtttggctagtttctcttttccctctttttcaatcaagccttcttgtatgcccaactcattgattaatctctctatttttaccattatttcccgttcaggtagtttatcccctaaatcttcatcggggggcaatgtagggcattctgaaggggctttttcttctgtctggacattatctaatattgaagtaaccaaactatcttcagttttttctattcctattaattcatattcggttactgtatccgtatcaatatccgaataactatctttatccgtattagctattcggttaagtttatccgttaactcagaaacaagactatatagcggttttagcttttcttctatcctgttatctaatacggataagtttatacggttatcattatccgtattagtatcattgggcttttttggtagttctaccccctcataaaccgcttttattcccaattccaacagactgataacagtatcctttataatgggttttttgctgatatggtgaacttttgccccttccatcattgcgatactttctatctcactcatcaacttatcgcttaagtgaatctcgtatctgtttaatcccttactggttttattcatatccgtttactttattcggttaacaattctattttatacgaataaaatattatacggttaactttatacgtttaactattttatctatacggataacagtaataagttattcgtattagttatacgtttacttttatccaaataaaattagtgcatttaaactaaaagaatgattttatcggagttgatagcattggattaacctaaagatgtttataagctatatctgataagtatttaaggttattttgttattctgtttattgacattatcagaataaaagaatagaatataattgttgagagataagaggtttaagtgattatggttaagaagttagttggttatgtcagggtcagtagtgaatcgcaagaggataacactagcttacagaatcagatagagagaattgaagcatattgtatggcttttggttatgagttggtaaaaatattcaaagaggttgccactggtacaaaagcagatattgaaacccgtcctatttttaatgaagctatagaatacttgaaacaggataatgctaatggaattattgccttgaagctagaccgaatcgcacggaatgctttagatgtattgcgtttggttcgtgaaaccttagaaccacaaaataaaatgttagtgttactagatattcaggtagatacttcgacaccttcaggaaaaatgattttaactgtaatgagtgccgttgctgaactcgaaagagacatgatctatgatcgcactcaggggggtagaaagactaaagcccaaaagggcgggtatgcctacgggaaacctaaatttggctataagactgaagaaaaggaactaaaagaagattcagcacaacaggaaactattaaactaattaagagacaccgtaggtcagggaaaagctaccagaaaatagctgattatctcaatgcccaaagtattcccactaaacaaggtaagaaatggagttctagcgtcgtctatcgaatctgtcaggaaaaagctggttaagtctgtttatagatatttagaatttattgaataaaaatagtatgaacaataaatatttatggactaaccacgctcggaaacgtttaactgaacgatgggaaataaaagaatcatgggttattgataccatcgaaaatcctgaacgttcagaatttattgttgatgagtcaggggaaaaatatcattactataaaagaatagctaagtttaagaatagagtgttagaagtgataacttctgccaactcaacacccacaagaataataaccttttactttaaccgtaacatgaggaaaaatttatgattgttacttacgataatgaagttgacgcaatttattttaagttaacggaaaataaaattgatagcaccgaacctcaaacagacaggattatcattgattacgatgaaagtaataatattgttggcattgaggtattagattttaattatcttgtcaagaaaggtttaaccgttgctgatttacctttttctgaagatgaaagattaacagcttctcaatattttaattttcctgttgctatctaatccagaaggggcaataatccccttctttcatcgagttagacttaatatcacaaaagtcattttcattttaccgtttcttttccacagcgtccgtacgcccctcgttaaatctcaaaaccgacaatttatgatgtttataaaaagttactcactttaataagtatttatactcattaaagggttattctttttttgtagcctgataggttgggaaggaatatttcagattatcagatttgttgaatatttttcgtcagatacgcaaaccttacaaacataattaacaactgaaactattgatatgtctaggttttagctctatcacaggttggatctg

SEQ ID NO: 60 - DNA, 12938 bp, Cyanobacterium sp. ABICyano1
tcgacattctgtgaattgattagatttgaggttttttaagaggttgattaccttgcctccaaaaaaatcataacacactaatgctctatatgaaagggctttagacccataggtttttgagaaaaaaacttgctaactctcggacaatgtcagcataactaaagtcaattcttttcgtactttataattgtctataatttaatatacaactgttctgaaactagtttttctctacattccttagttttatctgagtaaggttgcttgtaacttaacttcggttgggcctaaaaatatccgattaggagcaggtgtcagactttaattaattattaattattaattgcttattgccaaccctcggcgacaccactttttcatcagccccagataaagattgatgttttagttttgtttctttttatcccctaattcaactaatacaagtaaaactaaggttgtttatcaaaaatgatggttgatgtttgggtaaattttaagatattatgaaaagaaaatgaataaaaaatgaaaaatctttatgaattcttataccgtgggtacttatttagccgaacgcttagtgcaaattggtttaaaacatcattttgccgtggctggggactataatttagtgttattggataacttattattaaataaaaacatggaacaagtgtattgttgtaatgaattaaattgtggtttttctgctgaaggttatgctagagctaaaggtgcagctgctgctgttgttacttattctgtgggtgctttatctgcttttgatgctattggtggtgcttatgccgaaaatttacccgtgattttaatttctggtgcccctaataataatgatcatgccgctggacatgttttacatcatgccttaggtaaaaccgattatcattatcaattagaaatggccaaaaatattactgctgctgccgaagctatttatactcctgaagaagcccctgccaaaattgatcatgtgattaaaaccgccttacgcgaaaaaaaacccgtgtatttagaaattgcctgtaatattgcttctatgccttgtgctgctcctgggcctgcttctgctttatttaatgatgaagcctctgatgaagctagtttaaatgctgccgtggaagaaaccttaaaatttattgccaatcgcgataaagttgccgtgttagttggttctaaattaagagctgctggtgctgaagaagctgctgttaaatttgctgatgctttaggtggtgcagttgctactatggctgctgccaaatctttttttcccgaagaaaatccccattatattggaactagttggggagaagtttcttatcctggtgtggaaaaaactatgaaagaagccgacgctgttattgctttagcccctgtgtttaatgattattctaccactggttggactgatattcccgatcccaaaaaattagttttagccgaacctcgttctgttgttgttaatggtgttcgctttccctctgtgcatttaaaagattatttaacccgcttagcccaaaaagtttctaaaaaaactggtgccttagatttttttaaatctttaaatgcgggtgaattaaaaaaagctgctcctgctgatccttctgctcctttagttaatgctgaaattgcccgtcaagttgaagccttattaacccctaatactaccgttattgccgaaactggtgattcttggtttaatgcccaacgcatgaaattacctaatggtgcccgtgttgaatatgaaatgcaatggggtcatattggttggtctgtacctgctgcttttggttatgctgttggtgctcctgaacgtcgtaatattttaatggtgggtgatggttcttttcaattaactgcccaagaagttgcccaaatggttcgcttaaaattacccgttattatttttttaataaataattatggttataccattgaagtgatgattcatgatgggccatataataatattaaaaattgggattatgcgggtttaatggaagtgtttaatggtaatggtggttatgattctggtgctggtaaaggtttaaaagccaaaactggtggtgaattagctgaagctattaaagttgccttagccaatactgatgggccaaccttaattgaatgttttattggtcgcgaagattgtaccgaagaattagttaaatggggtaaacgtgttgctgctgctaattctcgcaaacccgtgaataaattattgtaatttttggggatcaattcgagctcagcaagtttcatcccgaccccctcagggtcgggatttttttattgtactagttgacataagtaaaggcatcccctgcgtgatataattaccttcagtttaaggaggtatacacatatgagtgaaactaaatttaaagcctatgccgtaatgaatcctggtgaaaaattacaaccctgggaatatgaacctgctcctttacaggtagatgaaattgaagtaagagttactcacaatggtttatgtcacactgacttacacatgagagataatgactggaatgttagtgagttccccttagtagcaggtcatgaagttgttggtgaagtaaccgctgttggtgaaaaagtaaccagtcgtaaaaaaggtgatagagttggtgtaggttggattcgtaattcttgtcgcgcttgtgaccattgtttacaaggagaagagaacatttgtagagagggttatactggtttaattgttggtcatcacggtggatttgctgatcgtgtacgtgtacctgctgacttcacttataaaattcctgatgctttagatagtgcatctgctgctcctttattatgtgccggtattaccgtttacactcctttaagaacctacattaaacatcccggtatgaaagtaggtgttatgggtattggaggattaggacatttagctattaaatttgctcgtgcaatgggagcagaagttactgcctttagtaccagtcctaataaagaagcccaagccaaagaatttggtgctcatcatttccaacaatggggtactgctgaagaaatgaaagctgttgccggtaattttgatttagttttatctaccatctctgctgaaactgactgggatgctgccttctctttattagcaaataacggtgttttatgtttcgtaggtattcccgttagttctttaaatgttcctttaattcctttaattttcggacaaaaatctgttgtaggttctgtagttggaggaagaagattcatggcagaaatgttagagttcgccgctgtaaatcagattaaacctatgatcgaaactatgcccttatctcaagtaaatgaagctatggataaagttgccgccaataaagccagatatagaattgtattattatctgaataactagatctcctgcagagaatataaaaagccagattattaatccggcttttttattatttaaatactgtgcacgatcctgcaggatcatcttgctgaaaaactcgagcgctcgttccgcaaagcggtacggagttagttaggggctaatgggcattctcccgtacaggaaagagttagaagttattaattatcaacaattctcctttgcctagtgcatcgttacctttttaattaaaacataaggaaaactaataatcgtaataatttaacctcaaagtgtaaagaaatgtgaaattctgacttttataacgttaaagagggaaaaattagcagtttaaaatacctagagaatagtctggggtaagcatagagaattagattagttaagttaatcaaattcagaaaaaataataatcgtaaatagttaatctgggtgtatagaaaatgatccccttcatgataagatttaaactcgaaaagcaaaagccaaaaaactaacttccattaaaagaagttgttacatataacgctataaagaaaatttatatatttggaggataccaaccatgtctcatattcaacgtgaaactagttgttctcgccctcgtttaaattctaatatggatgccgatttatatggttataaatgggctcgtgataatgttggtcaatctggtgctactatttatcgtttatatggtaaacctgatgctcctgaattattcttgaaacatggtaaaggttctgttgctaatgatgttactgatgaaatggttcgtttaaactggttgactgaatttatgcctttacctactattaaacattttattcgtactcccgatgatgcttggttattaactactgctattcctggtaaaactgcttttcaagttttagaagaatatcctgattctggtgaaaatattgttgatgctttagctgtttttttacgtcgtttacattctattcccgtttgtaattgtccttttaattctgatcgtgtttttcgtttagctcaagctcaatctcgtatgaataatggtttagttgatgcttctgattttgatgatgaacgtaatggttggcctgttgaacaagtttggaaagaaatgcacaaattgttacctttttctcctgattctgttgttactcatggtgatttttctttagataatttgatctttgatgaaggtaaattgattggttgtattgatgttggtcgtgttggtattgctgatcgttatcaagatttagctattttatggaattgtttaggtgaattttctccttctttacagaaacgtttatttcagaaatatggtattgataatcctgatatgaacaagttacaatttcatttaatgttggacgagttcttttaagaattaattcatgaccaaaatcccttaacgtgagttttcgttccactgagcgtcagaccccgtagaaaagatcaaaggatcttcttgagatcctttttttctgcgcgtaatctgctgctatttaaattacgtacacgtgttattactttgttaacgacaattgtcttaattaactgggcctcatgggccttccgctcactgcccgctttccagtcgggaaacctgtcgtgccagctctgcagatgacggtgaaaacctctgacacatgcagctcccggagacggtcacagcttgtctgtaagcggatgccgggagcagacaagcccgtcagggcgcgtcagcgggtgttggcgggtgtcggggcgcagccatgacccagtcacgtagcgatagcggagtgtatactggcttaactatgcggcatcagagcagattgtactgagagtgcaccatatgcggtgtgaaataccgcacagatgcgtaaggagaaaataccgcatcaggcgctcttccgcttcctcgctcactgactcgctgcgctcggtcgttcggctgcggcgagcggtatcagctcactcaaaggcggtaatacggttatccacagaatcaggggataacgcaggaaagaacatgtgagcaaaaggccagcaaaaggccaggaaccgtaaaaaggccgcgttgctggcgtttttccataggctccgcccccctgacgagcatcacaaaaatcgacgctcaagtcagaggtggcgaaacccgacaggactataaagataccaggcgtttccccctggaagctccctcgtgcgctctcctgttccgaccctgccgcttaccggatacctgtccgcctttctcccttcgggaagcgtggcgctttctcatagctcacgctgtaggtatctcagttcggtgtaggtcgttcgctccaagctgggctgtgtgcacgaaccccccgttcagcccgaccgctgcgccttatccggtaactatcgtcttgagtccaacccggtaagacacgacttatcgccactggcagcagccactggtaacaggattagcagagcgaggtatgtaggcggtgctacagagttcttgaagtggtggcctaactacggctacactagaaggacagtatttggtatctgcgctctgctgaagccagttaccttcggaaaaagagttggtagctcttgatccggcaaacaaaccaccgctggtagcggtggtttttttgtttgcaagcagcagattacgcgcagaaaaaaaggatctcaagaagatcctttgatcttttctactgcagaagcttgttagacaccctgtcatgtattttatattatttatttcaccatacggattaagtgaaacctaatgaaaatagtactttcggagctttaactttaatgaaggtatgtttttttatagacatcgatgtctggtttaacaataggaaaaagtagctaaaactcccatgaattaaagaaataacaaggtgtctaacaacctgttattaagaatgttagaaaagacttaacatttgtgttgagtttttatagacattggtgtctagacatacggtagataaggtttgctcaaaaataaaataaaaaaagattggactaaaaaacatttaatttagtacaatttaattagttattttttcgtctcaaattttgctttgttgagcagaaatttagataaaaaaatccccgtgatcagattacaatgtcgttcattgtacgatgtgtcgaaaaatctttacgacactctaaactgaccacacgggggaaaaagaaaactgaactaataacatcatgatactcggaaaacctagcaattctcaacccctaaacaaaagaaacttccaaaaccctgaccatataaaggagtggcaacaatcagcaatcagtcaagatttgatagcagaaaatcttgtatcggttgctaatggttttgatgtactatttatcggcaataaataccgaactaacacgggtgttctgtcacggcacatattaaactcctattctcatttagaagatggtggttcgtatggtagaacatttgacccatttaccaataaagaaatgcagtgggttcaatttaaaccgaatagaccaagaaaaggttctactggtaaggtaatcaaatatgaatcgccaaaaggtgaacctacaagagttctaatgccgtttgtgcctatgaaaatatggcaacggattagcgataagttcggagtaccgattaatccgaaaaaagatactcacttttgggaatgggtaaagaataatccatcgataccgattgccattacagaaggaaataaaaaagctaattgcctattatcctatggctatcctgctattgcctttgtaggcatttggaacggattagagaaaataaatgatttctcgaaggaaaagcagttaaaagaggatttgaaatggttgttatccaacggcaaccgaaatattaatatcatctttgaccaagaccagaaacaaaaaactgtaattaatgtaaacaaagctattttcgctttatcttctctaataagtagaaatggtcataaagttaatattgtgcaatggttgccgtcaaaaggtaaaggaatagatgattatttggtagctttaccttttgagaaaagagaaaatcatttagacaacttaattaaaattgcaccatcatttaatttttggtcaactaaatacttattcaagtgtcgtaaaccagatttaaccgtaaattgccgttatttgagcgatgcagtaaaagaattacctcaagaggatatagcattaatagcacctcacggcacgggtaaaacttcattagtagctactcacgttaagaatcggagttatcacggaaggaaaactatttcattggtgcatcttgaaagtttagccaaagctaatggcaacgcacttggattatattaccgaaccgaaaataatattgaaaagcaatatcttggatttagcttatgtgtagatagttgccgtgataagattaacggcattacaactgatattatttcaggtcaagattattgccttttcattgatgaaattgaccaagtaattccacacatccttaacagtgaaactgaagtaagtaagtatagatgcaccatcattgacactttttctgaactggtgagaaatgctgaacaggtcattattgctgatgctgatttatccgatgtgacgattgacctaatagaaaacatcagaggtaaaaaactatatgtaatcaagaatgaatatcagtatcagggaatgacttttaacgccgttggttcaccattagaaatgatggcaatgatgggaaaatcggtgtcagaaggcaagaaattatttattaacaccacatcccaaaaggcaaaaagtaagtacggcacaatcgctcttgagtcttatatttttggtctaaataaagaagcaaagatattaagaatagactctgaaaccactaaaaaccctgaacatccagcctataaaatcattgaccaagacttaaataatatcctcaaagattatgattatgtcattgcctcaccttgccttcaaacaggtgtcagtattaccttaaaagggcattttgaccagcaatttaacttttccagtggaaacattacacctcattgctttttacagcaaatgtggcggttgagggatgcagaaattgaaagattctattatgtgccgaactcatctaacctcaatctcattgggaataagtcaagttcaccatcagaccttctaaagagcaataacaagatggcaacggcaacggttaaccttttgggtagaatcgactccgaatattccctagagtatgaatcgcacggcatttggcttgagacgtgggcaaaattatcagcacggcataacagttcaatgcgttgttactctgaaattcttacctatctaattacgtctcaagggcataaattaaatatcaacattccctcacctcttgcagatattaagaagctaaatgatgaggtaagtagtaacagggaaaaggtaaaaaatgagagatactctcagaggttaaactcaccagatattaacgatgcagaagctaccatactcgaatctaaagagcaaaaaatcggattgactctcaatgagagatgcaccctagaaaagcataaagttaagaagcggtatgggaatgtaaagatggatattctcacctttgatgatgatggactataccccaaactcagactattttattacctcaccatcggtaaacctcatctcaaggctaatgacagaaaagctattgccaaaatgggcaatgacaataaaggcaagattctatcaaaagacttagttaataaaacttactccgctcgtgtgaaggtcttagagattcttaaactaactgactttatcgacaatcttagagatgaactcttaataactcccaataatccagctatcaccgattttaataatcttctgctaagagctaagaaggatttaagagtattaggagtcaacatcggaaaatatccaatggccaacattaatgccgtacttactctcattggtcacaaactttctgtaatgagagatgagttcggaaaagagaaaaggataaaagtagatggtaaatcataccgatgttatcaacttgaaacattaccagattttaccaatgatactcttgactactggttagaaaatgatagccaaaaagaagtaacagcaacagaaaattactccgaaaattttaacccttcaaatagctacaatccagacagtaagacactttcagagggtgcaaatttcctatatataaataaagaagaattgcatccaaataaattgcacctagaaataaaagaaggtgctgaactttttttattcggggtaaaggtgattgtgaaaggaatcttggacggggcagtaactatattctctatgggtcaagaatacgatttatccctcaatgaactagaggggatgttaacatcatgaactttacaagaatctttttaaagggcgatcgcaccatgttaaatgatggtacatttgttcagatatttgatatttaccatgaccacgcattgggagtgacccttgaccttaagacagaaaaaattatttccgatgatgttagggtaattactgtcaaagacttattgttcgatggcacttataaaggggtaaaatcttttatgcccgataatgcccgataatgcccgattgatgctacaaaatcccataatcataagcgataatcccctaatagcttgtaattcttgaaccgtagcgattttagagtattccaaaaagaagaaataaacaccgcaaaatgtcgtatttcacatatataaaccaaggttttttgccctaaaatctttatgtttgtagtgtgatgttgggtcaaaatggtcagaaaagttgcaaggtttttatggatgcttacgcgcgcgaggggtaagcatccccaaatagttactttatcctagtccatgcccatttattgccgtcccgttcggctttaaaaaagtgccaaaactcacaaggtgcaataaaaagttctgtacctttcgcaaccctagataatctttcaacagttactttttttcctattatctcggtacaaagtttggctagtttctcttttccctctttttcaatcaagccttcttgtatgcccaactcattgattaatctctctatttttaccattatttcccgttcaggtagtttatcccctaaatcttcatcggggggcaatgtagggcattctgaaggggctttttcttctgtctggacattatctaatattgaagtaaccaaactatcttcagttttttctattcctattaattcatattcggttactgtatccgtatcaatatccgaataactatctttatccgtattagctattcggttaagtttatccgttaactcagaaacaagactatatagcggttttagcttttcttctatcctgttatctaatacggataagtttatacggttatcattatccgtattagtatcattgggcttttttggtagttctaccccctcataaaccgcttttattcccaattccaacagactgataacagtatcctttataatgggttttttgctgatatggtgaacttttgccccttccatcattgcgatactttctatctcactcatcaacttatcgcttaagtgaatctcgtatctgtttaatcccttactggttttattcatatccgtttactttattcggttaacaattctattttatacgaataaaatattatacggttaactttatacgtttaactattttatctatacggataacagtaataagttattcgtattagttatacgtttacttttatccaaataaaattagtgcatttaaactaaaagaatgattttatcggagttgatagcattggattaacctaaagatgtttataagctatatctgataagtatttaaggttattttgttattctgtttattgacattatcagaataaaagaatagaatataattgttgagagataagaggtttaagtgattatggttaagaagttagttggttatgtcagggtcagtagtgaatcgcaagaggataacactagcttacagaatcagatagagagaattgaagcatattgtatggcttttggttatgagttggtaaaaatattcaaagaggttgccactggtacaaaagcagatattgaaacccgtcctatttttaatgaagctatagaatacttgaaacaggataatgctaatggaattattgccttgaagctagaccgaatcgcacggaatgctttagatgtattgcgtttggttcgtgaaaccttagaaccacaaaataaaatgttagtgttactagatattcaggtagatacttcgacaccttcaggaaaaatgattttaactgtaatgagtgccgttgctgaactcgaaagagacatgatctatgatcgcactcaggggggtagaaagactaaagcccaaaagggcgggtatgcctacgggaaacctaaatttggctataagactgaagaaaaggaactaaaagaagattcagcacaacaggaaactattaaactaattaagagacaccgtaggtcagggaaaagctaccagaaaatagctgattatctcaatgcccaaagtattcccactaaacaaggtaagaaatggagttctagcgtcgtctatcgaatctgtcaggaaaaagctggttaagtctgtttatagatatttagaatttattgaataaaaatagtatgaacaataaatatttatggactaaccacgctcggaaacgtttaactgaacgatgggaaataaaagaatcatgggttattgataccatcgaaaatcctgaacgttcagaatttattgttgatgagtcaggggaaaaatatcattactataaaagaatagctaagtttaagaatagagtgttagaagtgataacttctgccaactcaacacccacaagaataataaccttttactttaaccgtaacatgaggaaaaatttatgattgttacttacgataatgaagttgacgcaatttattttaagttaacggaaaataaaattgatagcaccgaacctcaaacagacaggattatcattgattacgatgaaagtaataatattgttggcattgaggtattagattttaattatcttgtcaagaaaggtttaaccgttgctgatttacctttttctgaagatgaaagattaacagcttctcaatattttaattttcctgttgctatctaatccagaaggggcaataatccccttctttcatcgagttagacttaatatcacaaaagtcattttcattttaccgtttcttttccacagcgtccgtacgcccctcgttaaatctcaaaaccgacaatttatgatgtttataaaaagttactcactttaataagtatttatactcattaaagggttattctttttttgtagcctgataggttgggaaggaatatttcagattatcagatttgttgaatatttttcgtcagatacgcaaaccttacaaacataattaacaactgaaactattgatatgtctaggttttagctctatcacaggttggatctg

SEQ ID NO: 61 - DNA, 12722 bp, Cyanobacterium sp. ABICyano1
tcgacgaatatctcatccttagcttctacttataccttcagcatagttaaaaatcatccctttattgatggtaataaaagaacaggttttattagtggagtaacctttttaatgctcaatggttctcactttactgcttctgaagtggaagtagtacatatcatccaaaccttagctagtggcagaattaccgaggaagaattacaacaatggttcgtaaggaaaagtaagcagatgaataattaaagcatcatttcatcctcatttcatattctcctgtcaccatggtatggaagattaggtaaaaatgaggaaaaagtttattatgaattcttataccgtgggtacttatttagccgaacgcttagtgcaaattggtttaaaacatcattttgccgtggctggggactataatttagtgttattggataacttattattaaataaaaacatggaacaagtgtattgttgtaatgaattaaattgtggtttttctgctgaaggttatgctagagctaaaggtgcagctgctgctgttgttacttattctgtgggtgctttatctgcttttgatgctattggtggtgcttatgccgaaaatttacccgtgattttaatttctggtgcccctaataataatgatcatgccgctggacatgttttacatcatgccttaggtaaaaccgattatcattatcaattagaaatggccaaaaatattactgctgctgccgaagctatttatactcctgaagaagcccctgccaaaattgatcatgtgattaaaaccgccttacgcgaaaaaaaacccgtgtatttagaaattgcctgtaatattgcttctatgccttgtgctgctcctgggcctgcttctgctttatttaatgatgaagcctctgatgaagctagtttaaatgctgccgtggaagaaaccttaaaatttattgccaatcgcgataaagttgccgtgttagttggttctaaattaagagctgctggtgctgaagaagctgctgttaaatttgctgatgctttaggtggtgcagttgctactatggctgctgccaaatctttttttcccgaagaaaatccccattatattggaactagttggggagaagtttcttatcctggtgtggaaaaaactatgaaagaagccgacgctgttattgctttagcccctgtgtttaatgattattctaccactggttggactgatattcccgatcccaaaaaattagttttagccgaacctcgttctgttgttgttaatggtgttcgctttccctctgtgcatttaaaagattatttaacccgcttagcccaaaaagtttctaaaaaaactggtgccttagatttttttaaatctttaaatgcgggtgaattaaaaaaagctgctcctgctgatccttctgctcctttagttaatgctgaaattgcccgtcaagttgaagccttattaacccctaatactaccgttattgccgaaactggtgattcttggtttaatgcccaacgcatgaaattacctaatggtgcccgtgttgaatatgaaatgcaatggggtcatattggttggtctgtacctgctgcttttggttatgctgttggtgctcctgaacgtcgtaatattttaatggtgggtgatggttcttttcaattaactgcccaagaagttgcccaaatggttcgcttaaaattacccgttattatttttttaataaataattatggttataccattgaagtgatgattcatgatgggccatataataatattaaaaattgggattatgcgggtttaatggaagtgtttaatggtaatggtggttatgattctggtgctggtaaaggtttaaaagccaaaactggtggtgaattagctgaagctattaaagttgccttagccaatactgatgggccaaccttaattgaatgttttattggtcgcgaagattgtaccgaagaattagttaaatggggtaaacgtgttgctgctgctaattctcgcaaacccgtgaataaattattgtaatttttggggatcaattcgagctcagcaagtttcatcccgaccccctcagggtcgggatttttttattgtactagttgacataagtaaaggcatcccctgcgtgatataattaccttcagtttaaggaggtatacacatatgagtgaaactaaatttaaagcctatgccgtaatgaatcctggtgaaaaattacaaccctgggaatatgaacctgctcctttacaggtagatgaaattgaagtaagagttactcacaatggtttatgtcacactgacttacacatgagagataatgactggaatgttagtgagttccccttagtagcaggtcatgaagttgttggtgaagtaaccgctgttggtgaaaaagtaaccagtcgtaaaaaaggtgatagagttggtgtaggttggattcgtaattcttgtcgcgcttgtgaccattgtttacaaggagaagagaacatttgtagagagggttatactggtttaattgttggtcatcacggtggatttgctgatcgtgtacgtgtacctgctgacttcacttataaaattcctgatgctttagatagtgcatctgctgctcctttattatgtgccggtattaccgtttacactcctttaagaacctacattaaacatcccggtatgaaagtaggtgttatgggtattggaggattaggacatttagctattaaatttgctcgtgcaatgggagcagaagttactgcctttagtaccagtcctaataaagaagcccaagccaaagaatttggtgctcatcatttccaacaatggggtactgctgaagaaatgaaagctgttgccggtaattttgatttagttttatctaccatctctgctgaaactgactgggatgctgccttctctttattagcaaataacggtgttttatgtttcgtaggtattcccgttagttctttaaatgttcctttaattcctttaattttcggacaaaaatctgttgtaggttctgtagttggaggaagaagattcatggcagaaatgttagagttcgccgctgtaaatcagattaaacctatgatcgaaactatgcccttatctcaagtaaatgaagctatggataaagttgccgccaataaagccagatatagaattgtattattatctgaataactagatctcctgcagagaatataaaaagccagattattaatccggcttttttattatttaaatactgtgcacgatcctgcaggatcatcttgctgaaaaactcgagcgctcgttccgcaaagcggtacggagttagttaggggctaatgggcattctcccgtacaggaaagagttagaagttattaattatcaacaattctcctttgcctagtgcatcgttacctttttaattaaaacataaggaaaactaataatcgtaataatttaacctcaaagtgtaaagaaatgtgaaattctgacttttataacgttaaagagggaaaaattagcagtttaaaatacctagagaatagtctggggtaagcatagagaattagattagttaagttaatcaaattcagaaaaaataataatcgtaaatagttaatctgggtgtatagaaaatgatccccttcatgataagatttaaactcgaaaagcaaaagccaaaaaactaacttccattaaaagaagttgttacatataacgctataaagaaaatttatatatttggaggataccaaccatgtctcatattcaacgtgaaactagttgttctcgccctcgtttaaattctaatatggatgccgatttatatggttataaatgggctcgtgataatgttggtcaatctggtgctactatttatcgtttatatggtaaacctgatgctcctgaattattcttgaaacatggtaaaggttctgttgctaatgatgttactgatgaaatggttcgtttaaactggttgactgaatttatgcctttacctactattaaacattttattcgtactcccgatgatgcttggttattaactactgctattcctggtaaaactgcttttcaagttttagaagaatatcctgattctggtgaaaatattgttgatgctttagctgtttttttacgtcgtttacattctattcccgtttgtaattgtccttttaattctgatcgtgtttttcgtttagctcaagctcaatctcgtatgaataatggtttagttgatgcttctgattttgatgatgaacgtaatggttggcctgttgaacaagtttggaaagaaatgcacaaattgttacctttttctcctgattctgttgttactcatggtgatttttctttagataatttgatctttgatgaaggtaaattgattggttgtattgatgttggtcgtgttggtattgctgatcgttatcaagatttagctattttatggaattgtttaggtgaattttctccttctttacagaaacgtttatttcagaaatatggtattgataatcctgatatgaacaagttacaatttcatttaatgttggacgagttcttttaagaattaattcatgaccaaaatcccttaacgtgagttttcgttccactgagcgtcagaccccgtagaaaagatcaaaggatcttcttgagatcctttttttctgcgcgtaatctgctgctatttaaattacgtacacgtgttattactttgttaacgacaattgtcttaattaactgggcctcatgggccttccgctcactgcccgctttccagtcgggaaacctgtcgtgccagctctgcagatgacggtgaaaacctctgacacatgcagctcccggagacggtcacagcttgtctgtaagcggatgccgggagcagacaagcccgtcagggcgcgtcagcgggtgttggcgggtgtcggggcgcagccatgacccagtcacgtagcgatagcggagtgtatactggcttaactatgcggcatcagagcagattgtactgagagtgcaccatatgcggtgtgaaataccgcacagatgcgtaaggagaaaataccgcatcaggcgctcttccgcttcctcgctcactgactcgctgcgctcggtcgttcggctgcggcgagcggtatcagctcactcaaaggcggtaatacggttatccacagaatcaggggataacgcaggaaagaacatgtgagcaaaaggccagcaaaaggccaggaaccgtaaaaaggccgcgttgctggcgtttttccataggctccgcccccctgacgagcatcacaaaaatcgacgctcaagtcagaggtggcgaaacccgacaggactataaagataccaggcgtttccccctggaagctccctcgtgcgctctcctgttccgaccctgccgcttaccggatacctgtccgcctttctcccttcgggaagcgtggcgctttctcatagctcacgctgtaggtatctcagttcggtgtaggtcgttcgctccaagctgggctgtgtgcacgaaccccccgttcagcccgaccgctgcgccttatccggtaactatcgtcttgagtccaacccggtaagacacgacttatcgccactggcagcagccactggtaacaggattagcagagcgaggtatgtaggcggtgctacagagttcttgaagtggtggcctaactacggctacactagaaggacagtatttggtatctgcgctctgctgaagccagttaccttcggaaaaagagttggtagctcttgatccggcaaacaaaccaccgctggtagcggtggtttttttgtttgcaagcagcagattacgcgcagaaaaaaaggatctcaagaagatcctttgatcttttctactgcagaagcttgttagacaccctgtcatgtattttatattatttatttcaccatacggattaagtgaaacctaatgaaaatagtactttcggagctttaactttaatgaaggtatgtttttttatagacatcgatgtctggtttaacaataggaaaaagtagctaaaactcccatgaattaaagaaataacaaggtgtctaacaacctgttattaagaatgttagaaaagacttaacatttgtgttgagtttttatagacattggtgtctagacatacggtagataaggtttgctcaaaaataaaataaaaaaagattggactaaaaaacatttaatttagtacaatttaattagttattttttcgtctcaaattttgctttgttgagcagaaatttagataaaaaaatccccgtgatcagattacaatgtcgttcattgtacgatgtgtcgaaaaatctttacgacactctaaactgaccacacgggggaaaaagaaaactgaactaataacatcatgatactcggaaaacctagcaattctcaacccctaaacaaaagaaacttccaaaaccctgaccatataaaggagtggcaacaatcagcaatcagtcaagatttgatagcagaaaatcttgtatcggttgctaatggttttgatgtactatttatcggcaataaataccgaactaacacgggtgttctgtcacggcacatattaaactcctattctcatttagaagatggtggttcgtatggtagaacatttgacccatttaccaataaagaaatgcagtgggttcaatttaaaccgaatagaccaagaaaaggttctactggtaaggtaatcaaatatgaatcgccaaaaggtgaacctacaagagttctaatgccgtttgtgcctatgaaaatatggcaacggattagcgataagttcggagtaccgattaatccgaaaaaagatactcacttttgggaatgggtaaagaataatccatcgataccgattgccattacagaaggaaataaaaaagctaattgcctattatcctatggctatcctgctattgcctttgtaggcatttggaacggattagagaaaataaatgatttctcgaaggaaaagcagttaaaagaggatttgaaatggttgttatccaacggcaaccgaaatattaatatcatctttgaccaagaccagaaacaaaaaactgtaattaatgtaaacaaagctattttcgctttatcttctctaataagtagaaatggtcataaagttaatattgtgcaatggttgccgtcaaaaggtaaaggaatagatgattatttggtagctttaccttttgagaaaagagaaaatcatttagacaacttaattaaaattgcaccatcatttaatttttggtcaactaaatacttattcaagtgtcgtaaaccagatttaaccgtaaattgccgttatttgagcgatgcagtaaaagaattacctcaagaggatatagcattaatagcacctcacggcacgggtaaaacttcattagtagctactcacgttaagaatcggagttatcacggaaggaaaactatttcattggtgcatcttgaaagtttagccaaagctaatggcaacgcacttggattatattaccgaaccgaaaataatattgaaaagcaatatcttggatttagcttatgtgtagatagttgccgtgataagattaacggcattacaactgatattatttcaggtcaagattattgccttttcattgatgaaattgaccaagtaattccacacatccttaacagtgaaactgaagtaagtaagtatagatgcaccatcattgacactttttctgaactggtgagaaatgctgaacaggtcattattgctgatgctgatttatccgatgtgacgattgacctaatagaaaacatcagaggtaaaaaactatatgtaatcaagaatgaatatcagtatcagggaatgacttttaacgccgttggttcaccattagaaatgatggcaatgatgggaaaatcggtgtcagaaggcaagaaattatttattaacaccacatcccaaaaggcaaaaagtaagtacggcacaatcgctcttgagtcttatatttttggtctaaataaagaagcaaagatattaagaatagactctgaaaccactaaaaaccctgaacatccagcctataaaatcattgaccaagacttaaataatatcctcaaagattatgattatgtcattgcctcaccttgccttcaaacaggtgtcagtattaccttaaaagggcattttgaccagcaatttaacttttccagtggaaacattacacctcattgctttttacagcaaatgtggcggttgagggatgcagaaattgaaagattctattatgtgccgaactcatctaacctcaatctcattgggaataagtcaagttcaccatcagaccttctaaagagcaataacaagatggcaacggcaacggttaaccttttgggtagaatcgactccgaatattccctagagtatgaatcgcacggcatttggcttgagacgtgggcaaaattatcagcacggcataacagttcaatgcgttgttactctgaaattcttacctatctaattacgtctcaagggcataaattaaatatcaacattccctcacctcttgcagatattaagaagctaaatgatgaggtaagtagtaacagggaaaaggtaaaaaatgagagatactctcagaggttaaactcaccagatattaacgatgcagaagctaccatactcgaatctaaagagcaaaaaatcggattgactctcaatgagagatgcaccctagaaaagcataaagttaagaagcggtatgggaatgtaaagatggatattctcacctttgatgatgatggactataccccaaactcagactattttattacctcaccatcggtaaacctcatctcaaggctaatgacagaaaagctattgccaaaatgggcaatgacaataaaggcaagattctatcaaaagacttagttaataaaacttactccgctcgtgtgaaggtcttagagattcttaaactaactgactttatcgacaatcttagagatgaactcttaataactcccaataatccagctatcaccgattttaataatcttctgctaagagctaagaaggatttaagagtattaggagtcaacatcggaaaatatccaatggccaacattaatgccgtacttactctcattggtcacaaactttctgtaatgagagatgagttcggaaaagagaaaaggataaaagtagatggtaaatcataccgatgttatcaacttgaaacattaccagattttaccaatgatactcttgactactggttagaaaatgatagccaaaaagaagtaacagcaacagaaaattactccgaaaattttaacccttcaaatagctacaatccagacagtaagacactttcagagggtgcaaatttcctatatataaataaagaagaattgcatccaaataaattgcacctagaaataaaagaaggtgctgaactttttttattcggggtaaaggtgattgtgaaaggaatcttggacggggcagtaactatattctctatgggtcaagaatacgatttatccctcaatgaactagaggggatgttaacatcatgaactttacaagaatctttttaaagggcgatcgcaccatgttaaatgatggtacatttgttcagatatttgatatttaccatgaccacgcattgggagtgacccttgaccttaagacagaaaaaattatttccgatgatgttagggtaattactgtcaaagacttattgttcgatggcacttataaaggggtaaaatcttttatgcccgataatgcccgataatgcccgattgatgctacaaaatcccataatcataagcgataatcccctaatagcttgtaattcttgaaccgtagcgattttagagtattccaaaaagaagaaataaacaccgcaaaatgtcgtatttcacatatataaaccaaggttttttgccctaaaatctttatgtttgtagtgtgatgttgggtcaaaatggtcagaaaagttgcaaggtttttatggatgcttacgcgcgcgaggggtaagcatccccaaatagttactttatcctagtccatgcccatttattgccgtcccgttcggctttaaaaaagtgccaaaactcacaaggtgcaataaaaagttctgtacctttcgcaaccctagataatctttcaacagttactttttttcctattatctcggtacaaagtttggctagtttctcttttccctctttttcaatcaagccttcttgtatgcccaactcattgattaatctctctatttttaccattatttcccgttcaggtagtttatcccctaaatcttcatcggggggcaatgtagggcattctgaaggggctttttcttctgtctggacattatctaatattgaagtaaccaaactatcttcagttttttctattcctattaattcatattcggttactgtatccgtatcaatatccgaataactatctttatccgtattagctattcggttaagtttatccgttaactcagaaacaagactatatagcggttttagcttttcttctatcctgttatctaatacggataagtttatacggttatcattatccgtattagtatcattgggcttttttggtagttctaccccctcataaaccgcttttattcccaattccaacagactgataacagtatcctttataatgggttttttgctgatatggtgaacttttgccccttccatcattgcgatactttctatctcactcatcaacttatcgcttaagtgaatctcgtatctgtttaatcccttactggttttattcatatccgtttactttattcggttaacaattctattttatacgaataaaatattatacggttaactttatacgtttaactattttatctatacggataacagtaataagttattcgtattagttatacgtttacttttatccaaataaaattagtgcatttaaactaaaagaatgattttatcggagttgatagcattggattaacctaaagatgtttataagctatatctgataagtatttaaggttattttgttattctgtttattgacattatcagaataaaagaatagaatataattgttgagagataagaggtttaagtgattatggttaagaagttagttggttatgtcagggtcagtagtgaatcgcaagaggataacactagcttacagaatcagatagagagaattgaagcatattgtatggcttttggttatgagttggtaaaaatattcaaagaggttgccactggtacaaaagcagatattgaaacccgtcctatttttaatgaagctatagaatacttgaaacaggataatgctaatggaattattgccttgaagctagaccgaatcgcacggaatgctttagatgtattgcgtttggttcgtgaaaccttagaaccacaaaataaaatgttagtgttactagatattcaggtagatacttcgacaccttcaggaaaaatgattttaactgtaatgagtgccgttgctgaactcgaaagagacatgatctatgatcgcactcaggggggtagaaagactaaagcccaaaagggcgggtatgcctacgggaaacctaaatttggctataagactgaagaaaaggaactaaaagaagattcagcacaacaggaaactattaaactaattaagagacaccgtaggtcagggaaaagctaccagaaaatagctgattatctcaatgcccaaagtattcccactaaacaaggtaagaaatggagttctagcgtcgtctatcgaatctgtcaggaaaaagctggttaagtctgtttatagatatttagaatttattgaataaaaatagtatgaacaataaatatttatggactaaccacgctcggaaacgtttaactgaacgatgggaaataaaagaatcatgggttattgataccatcgaaaatcctgaacgttcagaatttattgttgatgagtcaggggaaaaatatcattactataaaagaatagctaagtttaagaatagagtgttagaagtgataacttctgccaactcaacacccacaagaataataaccttttactttaaccgtaacatgaggaaaaatttatgattgttacttacgataatgaagttgacgcaatttattttaagttaacggaaaataaaattgatagcaccgaacctcaaacagacaggattatcattgattacgatgaaagtaataatattgttggcattgaggtattagattttaattatcttgtcaagaaaggtttaaccgttgctgatttacctttttctgaagatgaaagattaacagcttctcaatattttaattttcctgttgctatctaatccagaaggggcaataatccccttctttcatcgagttagacttaatatcacaaaagtcattttcattttaccgtttcttttccacagcgtccgtacgcccctcgttaaatctcaaaaccgacaatttatgatgtttataaaaagttactcactttaataagtatttatactcattaaagggttattctttttttgtagcctgataggttgggaaggaatatttcagattatcagatttgttgaatatttttcgtcagatacgcaaaccttacaaacataattaacaactgaaactattgatatgtctaggttttagctctatcacaggttggatctg

SEQ ID NO: 62 - DNA, 12732 bp, Cyanobacterium sp. ABICyano1
tcgactggtcaagttactatatgtttagaaacaacaaaaaaagaagtcattataaaaataattgatacaggaattggcattaataaagaagaacaaaaattaatttttaatcgtttttatcgaatcaataaagcaagaaatagagagaaaggcagttgcggattaggtttagctattgcaaatgcgatcgcgcttaatcatggtggtagaataattttagaaagtcaagaaaatcaaggcagtatttttaccgtttatttaccgaaaatcatttcatcctaatttcatattcttttgacagaatcaaaggtaaagataaaaagagagaaacagtcatgaattcttataccgtgggtacttatttagccgaacgcttagtgcaaattggtttaaaacatcattttgccgtggctggggactataatttagtgttattggataacttattattaaataaaaacatggaacaagtgtattgttgtaatgaattaaattgtggtttttctgctgaaggttatgctagagctaaaggtgcagctgctgctgttgttacttattctgtgggtgctttatctgcttttgatgctattggtggtgcttatgccgaaaatttacccgtgattttaatttctggtgcccctaataataatgatcatgccgctggacatgttttacatcatgccttaggtaaaaccgattatcattatcaattagaaatggccaaaaatattactgctgctgccgaagctatttatactcctgaagaagcccctgccaaaattgatcatgtgattaaaaccgccttacgcgaaaaaaaacccgtgtatttagaaattgcctgtaatattgcttctatgccttgtgctgctcctgggcctgcttctgctttatttaatgatgaagcctctgatgaagctagtttaaatgctgccgtggaagaaaccttaaaatttattgccaatcgcgataaagttgccgtgttagttggttctaaattaagagctgctggtgctgaagaagctgctgttaaatttgctgatgctttaggtggtgcagttgctactatggctgctgccaaatctttttttcccgaagaaaatccccattatattggaactagttggggagaagtttcttatcctggtgtggaaaaaactatgaaagaagccgacgctgttattgctttagcccctgtgtttaatgattattctaccactggttggactgatattcccgatcccaaaaaattagttttagccgaacctcgttctgttgttgttaatggtgttcgctttccctctgtgcatttaaaagattatttaacccgcttagcccaaaaagtttctaaaaaaactggtgccttagatttttttaaatctttaaatgcgggtgaattaaaaaaagctgctcctgctgatccttctgctcctttagttaatgctgaaattgcccgtcaagttgaagccttattaacccctaatactaccgttattgccgaaactggtgattcttggtttaatgcccaacgcatgaaattacctaatggtgcccgtgttgaatatgaaatgcaatggggtcatattggttggtctgtacctgctgcttttggttatgctgttggtgctcctgaacgtcgtaatattttaatggtgggtgatggttcttttcaattaactgcccaagaagttgcccaaatggttcgcttaaaattacccgttattatttttttaataaataattatggttataccattgaagtgatgattcatgatgggccatataataatattaaaaattgggattatgcgggtttaatggaagtgtttaatggtaatggtggttatgattctggtgctggtaaaggtttaaaagccaaaactggtggtgaattagctgaagctattaaagttgccttagccaatactgatgggccaaccttaattgaatgttttattggtcgcgaagattgtaccgaagaattagttaaatggggtaaacgtgttgctgctgctaattctcgcaaacccgtgaataaattattgtaatttttggggatcaattcgagctcagcaagtttcatcccgaccccctcagggtcgggatttttttattgtactagttgacataagtaaaggcatcccctgcgtgatataattaccttcagtttaaggaggtatacacatatgagtgaaactaaatttaaagcctatgccgtaatgaatcctggtgaaaaattacaaccctgggaatatgaacctgctcctttacaggtagatgaaattgaagtaagagttactcacaatggtttatgtcacactgacttacacatgagagataatgactggaatgttagtgagttccccttagtagcaggtcatgaagttgttggtgaagtaaccgctgttggtgaaaaagtaaccagtcgtaaaaaaggtgatagagttggtgtaggttggattcgtaattcttgtcgcgcttgtgaccattgtttacaaggagaagagaacatttgtagagagggttatactggtttaattgttggtcatcacggtggatttgctgatcgtgtacgtgtacctgctgacttcacttataaaattcctgatgctttagatagtgcatctgctgctcctttattatgtgccggtattaccgtttacactcctttaagaacctacattaaacatcccggtatgaaagtaggtgttatgggtattggaggattaggacatttagctattaaatttgctcgtgcaatgggagcagaagttactgcctttagtaccagtcctaataaagaagcccaagccaaagaatttggtgctcatcatttccaacaatggggtactgctgaagaaatgaaagctgttgccggtaattttgatttagttttatctaccatctctgctgaaactgactgggatgctgccttctctttattagcaaataacggtgttttatgtttcgtaggtattcccgttagttctttaaatgttcctttaattcctttaattttcggacaaaaatctgttgtaggttctgtagttggaggaagaagattcatggcagaaatgttagagttcgccgctgtaaatcagattaaacctatgatcgaaactatgcccttatctcaagtaaatgaagctatggataaagttgccgccaataaagccagatatagaattgtattattatctgaataactagatctcctgcagagaatataaaaagccagattattaatccggcttttttattatttaaatactgtgcacgatcctgcaggatcatcttgctgaaaaactcgagcgctcgttccgcaaagcggtacggagttagttaggggctaatgggcattctcccgtacaggaaagagttagaagttattaattatcaacaattctcctttgcctagtgcatcgttacctttttaattaaaacataaggaaaactaataatcgtaataatttaacctcaaagtgtaaagaaatgtgaaattctgacttttataacgttaaagagggaaaaattagcagtttaaaatacctagagaatagtctggggtaagcatagagaattagattagttaagttaatcaaattcagaaaaaataataatcgtaaatagttaatctgggtgtatagaaaatgatccccttcatgataagatttaaactcgaaaagcaaaagccaaaaaactaacttccattaaaagaagttgttacatataacgctataaagaaaatttatatatttggaggataccaaccatgtctcatattcaacgtgaaactagttgttctcgccctcgtttaaattctaatatggatgccgatttatatggttataaatgggctcgtgataatgttggtcaatctggtgctactatttatcgtttatatggtaaacctgatgctcctgaattattcttgaaacatggtaaaggttctgttgctaatgatgttactgatgaaatggttcgtttaaactggttgactgaatttatgcctttacctactattaaacattttattcgtactcccgatgatgcttggttattaactactgctattcctggtaaaactgcttttcaagttttagaagaatatcctgattctggtgaaaatattgttgatgctttagctgtttttttacgtcgtttacattctattcccgtttgtaattgtccttttaattctgatcgtgtttttcgtttagctcaagctcaatctcgtatgaataatggtttagttgatgcttctgattttgatgatgaacgtaatggttggcctgttgaacaagtttggaaagaaatgcacaaattgttacctttttctcctgattctgttgttactcatggtgatttttctttagataatttgatctttgatgaaggtaaattgattggttgtattgatgttggtcgtgttggtattgctgatcgttatcaagatttagctattttatggaattgtttaggtgaattttctccttctttacagaaacgtttatttcagaaatatggtattgataatcctgatatgaacaagttacaatttcatttaatgttggacgagttcttttaagaattaattcatgaccaaaatcccttaacgtgagttttcgttccactgagcgtcagaccccgtagaaaagatcaaaggatcttcttgagatcctttttttctgcgcgtaatctgctgctatttaaattacgtacacgtgttattactttgttaacgacaattgtcttaattaactgggcctcatgggccttccgctcactgcccgctttccagtcgggaaacctgtcgtgccagctctgcagatgacggtgaaaacctctgacacatgcagctcccggagacggtcacagcttgtctgtaagcggatgccgggagcagacaagcccgtcagggcgcgtcagcgggtgttggcgggtgtcggggcgcagccatgacccagtcacgtagcgatagcggagtgtatactggcttaactatgcggcatcagagcagattgtactgagagtgcaccatatgcggtgtgaaataccgcacagatgcgtaaggagaaaataccgcatcaggcgctcttccgcttcctcgctcactgactcgctgcgctcggtcgttcggctgcggcgagcggtatcagctcactcaaaggcggtaatacggttatccacagaatcaggggataacgcaggaaagaacatgtgagcaaaaggccagcaaaaggccaggaaccgtaaaaaggccgcgttgctggcgtttttccataggctccgcccccctgacgagcatcacaaaaatcgacgctcaagtcagaggtggcgaaacccgacaggactataaagataccaggcgtttccccctggaagctccctcgtgcgctctcctgttccgaccctgccgcttaccggatacctgtccgcctttctcccttcgggaagcgtggcgctttctcatagctcacgctgtaggtatctcagttcggtgtaggtcgttcgctccaagctgggctgtgtgcacgaaccccccgttcagcccgaccgctgcgccttatccggtaactatcgtcttgagtccaacccggtaagacacgacttatcgccactggcagcagccactggtaacaggattagcagagcgaggtatgtaggcggtgctacagagttcttgaagtggtggcctaactacggctacactagaaggacagtatttggtatctgcgctctgctgaagccagttaccttcggaaaaagagttggtagctcttgatccggcaaacaaaccaccgctggtagcggtggtttttttgtttgcaagcagcagattacgcgcagaaaaaaaggatctcaagaagatcctttgatcttttctactgcagaagcttgttagacaccctgtcatgtattttatattatttatttcaccatacggattaagtgaaacctaatgaaaatagtactttcggagctttaactttaatgaaggtatgtttttttatagacatcgatgtctggtttaacaataggaaaaagtagctaaaactcccatgaattaaagaaataacaaggtgtctaacaacctgttattaagaatgttagaaaagacttaacatttgtgttgagtttttatagacattggtgtctagacatacggtagataaggtttgctcaaaaataaaataaaaaaagattggactaaaaaacatttaatttagtacaatttaattagttattttttcgtctcaaattttgctttgttgagcagaaatttagataaaaaaatccccgtgatcagattacaatgtcgttcattgtacgatgtgtcgaaaaatctttacgacactctaaactgaccacacgggggaaaaagaaaactgaactaataacatcatgatactcggaaaacctagcaattctcaacccctaaacaaaagaaacttccaaaaccctgaccatataaaggagtggcaacaatcagcaatcagtcaagatttgatagcagaaaatcttgtatcggttgctaatggttttgatgtactatttatcggcaataaataccgaactaacacgggtgttctgtcacggcacatattaaactcctattctcatttagaagatggtggttcgtatggtagaacatttgacccatttaccaataaagaaatgcagtgggttcaatttaaaccgaatagaccaagaaaaggttctactggtaaggtaatcaaatatgaatcgccaaaaggtgaacctacaagagttctaatgccgtttgtgcctatgaaaatatggcaacggattagcgataagttcggagtaccgattaatccgaaaaaagatactcacttttgggaatgggtaaagaataatccatcgataccgattgccattacagaaggaaataaaaaagctaattgcctattatcctatggctatcctgctattgcctttgtaggcatttggaacggattagagaaaataaatgatttctcgaaggaaaagcagttaaaagaggatttgaaatggttgttatccaacggcaaccgaaatattaatatcatctttgaccaagaccagaaacaaaaaactgtaattaatgtaaacaaagctattttcgctttatcttctctaataagtagaaatggtcataaagttaatattgtgcaatggttgccgtcaaaaggtaaaggaatagatgattatttggtagctttaccttttgagaaaagagaaaatcatttagacaacttaattaaaattgcaccatcatttaatttttggtcaactaaatacttattcaagtgtcgtaaaccagatttaaccgtaaattgccgttatttgagcgatgcagtaaaagaattacctcaagaggatatagcattaatagcacctcacggcacgggtaaaacttcattagtagctactcacgttaagaatcggagttatcacggaaggaaaactatttcattggtgcatcttgaaagtttagccaaagctaatggcaacgcacttggattatattaccgaaccgaaaataatattgaaaagcaatatcttggatttagcttatgtgtagatagttgccgtgataagattaacggcattacaactgatattatttcaggtcaagattattgccttttcattgatgaaattgaccaagtaattccacacatccttaacagtgaaactgaagtaagtaagtatagatgcaccatcattgacactttttctgaactggtgagaaatgctgaacaggtcattattgctgatgctgatttatccgatgtgacgattgacctaatagaaaacatcagaggtaaaaaactatatgtaatcaagaatgaatatcagtatcagggaatgacttttaacgccgttggttcaccattagaaatgatggcaatgatgggaaaatcggtgtcagaaggcaagaaattatttattaacaccacatcccaaaaggcaaaaagtaagtacggcacaatcgctcttgagtcttatatttttggtctaaataaagaagcaaagatattaagaatagactctgaaaccactaaaaaccctgaacatccagcctataaaatcattgaccaagacttaaataatatcctcaaagattatgattatgtcattgcctcaccttgccttcaaacaggtgtcagtattaccttaaaagggcattttgaccagcaatttaacttttccagtggaaacattacacctcattgctttttacagcaaatgtggcggttgagggatgcagaaattgaaagattctattatgtgccgaactcatctaacctcaatctcattgggaataagtcaagttcaccatcagaccttctaaagagcaataacaagatggcaacggcaacggttaaccttttgggtagaatcgactccgaatattccctagagtatgaatcgcacggcatttggcttgagacgtgggcaaaattatcagcacggcataacagttcaatgcgttgttactctgaaattcttacctatctaattacgtctcaagggcataaattaaatatcaacattccctcacctcttgcagatattaagaagctaaatgatgaggtaagtagtaacagggaaaaggtaaaaaatgagagatactctcagaggttaaactcaccagatattaacgatgcagaagctaccatactcgaatctaaagagcaaaaaatcggattgactctcaatgagagatgcaccctagaaaagcataaagttaagaagcggtatgggaatgtaaagatggatattctcacctttgatgatgatggactataccccaaactcagactattttattacctcaccatcggtaaacctcatctcaaggctaatgacagaaaagctattgccaaaatgggcaatgacaataaaggcaagattctatcaaaagacttagttaataaaacttactccgctcgtgtgaaggtcttagagattcttaaactaactgactttatcgacaatcttagagatgaactcttaataactcccaataatccagctatcaccgattttaataatcttctgctaagagctaagaaggatttaagagtattaggagtcaacatcggaaaatatccaatggccaacattaatgccgtacttactctcattggtcacaaactttctgtaatgagagatgagttcggaaaagagaaaaggataaaagtagatggtaaatcataccgatgttatcaacttgaaacattaccagattttaccaatgatactcttgactactggttagaaaatgatagccaaaaagaagtaacagcaacagaaaattactccgaaaattttaacccttcaaatagctacaatccagacagtaagacactttcagagggtgcaaatttcctatatataaataaagaagaattgcatccaaataaattgcacctagaaataaaagaaggtgctgaactttttttattcggggtaaaggtgattgtgaaaggaatcttggacggggcagtaactatattctctatgggtcaagaatacgatttatccctcaatgaactagaggggatgttaacatcatgaactttacaagaatctttttaaagggcgatcgcaccatgttaaatgatggtacatttgttcagatatttgatatttaccatgaccacgcattgggagtgacccttgaccttaagacagaaaaaattatttccgatgatgttagggtaattactgtcaaagacttattgttcgatggcacttataaaggggtaaaatcttttatgcccgataatgcccgataatgcccgattgatgctacaaaatcccataatcataagcgataatcccctaatagcttgtaattcttgaaccgtagcgattttagagtattccaaaaagaagaaataaacaccgcaaaatgtcgtatttcacatatataaaccaaggttttttgccctaaaatctttatgtttgtagtgtgatgttgggtcaaaatggtcagaaaagttgcaaggtttttatggatgcttacgcgcgcgaggggtaagcatccccaaatagttactttatcctagtccatgcccatttattgccgtcccgttcggctttaaaaaagtgccaaaactcacaaggtgcaataaaaagttctgtacctttcgcaaccctagataatctttcaacagttactttttttcctattatctcggtacaaagtttggctagtttctcttttccctctttttcaatcaagccttcttgtatgcccaactcattgattaatctctctatttttaccattatttcccgttcaggtagtttatcccctaaatcttcatcggggggcaatgtagggcattctgaaggggctttttcttctgtctggacattatctaatattgaagtaaccaaactatcttcagttttttctattcctattaattcatattcggttactgtatccgtatcaatatccgaataactatctttatccgtattagctattcggttaagtttatccgttaactcagaaacaagactatatagcggttttagcttttcttctatcctgttatctaatacggataagtttatacggttatcattatccgtattagtatcattgggcttttttggtagttctaccccctcataaaccgcttttattcccaattccaacagactgataacagtatcctttataatgggttttttgctgatatggtgaacttttgccccttccatcattgcgatactttctatctcactcatcaacttatcgcttaagtgaatctcgtatctgtttaatcccttactggttttattcatatccgtttactttattcggttaacaattctattttatacgaataaaatattatacggttaactttatacgtttaactattttatctatacggataacagtaataagttattcgtattagttatacgtttacttttatccaaataaaattagtgcatttaaactaaaagaatgattttatcggagttgatagcattggattaacctaaagatgtttataagctatatctgataagtatttaaggttattttgttattctgtttattgacattatcagaataaaagaatagaatataattgttgagagataagaggtttaagtgattatggttaagaagttagttggttatgtcagggtcagtagtgaatcgcaagaggataacactagcttacagaatcagatagagagaattgaagcatattgtatggcttttggttatgagttggtaaaaatattcaaagaggttgccactggtacaaaagcagatattgaaacccgtcctatttttaatgaagctatagaatacttgaaacaggataatgctaatggaattattgccttgaagctagaccgaatcgcacggaatgctttagatgtattgcgtttggttcgtgaaaccttagaaccacaaaataaaatgttagtgttactagatattcaggtagatacttcgacaccttcaggaaaaatgattttaactgtaatgagtgccgttgctgaactcgaaagagacatgatctatgatcgcactcaggggggtagaaagactaaagcccaaaagggcgggtatgcctacgggaaacctaaatttggctataagactgaagaaaaggaactaaaagaagattcagcacaacaggaaactattaaactaattaagagacaccgtaggtcagggaaaagctaccagaaaatagctgattatctcaatgcccaaagtattcccactaaacaaggtaagaaatggagttctagcgtcgtctatcgaatctgtcaggaaaaagctggttaagtctgtttatagatatttagaatttattgaataaaaatagtatgaacaataaatatttatggactaaccacgctcggaaacgtttaactgaacgatgggaaataaaagaatcatgggttattgataccatcgaaaatcctgaacgttcagaatttattgttgatgagtcaggggaaaaatatcattactataaaagaatagctaagtttaagaatagagtgttagaagtgataacttctgccaactcaacacccacaagaataataaccttttactttaaccgtaacatgaggaaaaatttatgattgttacttacgataatgaagttgacgcaatttattttaagttaacggaaaataaaattgatagcaccgaacctcaaacagacaggattatcattgattacgatgaaagtaataatattgttggcattgaggtattagattttaattatcttgtcaagaaaggtttaaccgttgctgatttacctttttctgaagatgaaagattaacagcttctcaatattttaattttcctgttgctatctaatccagaaggggcaataatccccttctttcatcgagttagacttaatatcacaaaagtcattttcattttaccgtttcttttccacagcgtccgtacgcccctcgttaaatctcaaaaccgacaatttatgatgtttataaaaagttactcactttaataagtatttatactcattaaagggttattctttttttgtagcctgataggttgggaaggaatatttcagattatcagatttgttgaatatttttcgtcagatacgcaaaccttacaaacataattaacaactgaaactattgatatgtctaggttttagctctatcacaggttggatctg

SEQ ID NO: 63 - DNA, 12766 bp, Cyanobacterium sp. ABICyano1
tcgacaaagattattttctacagaagcaaccctttcatcttccgaattttcaggaatttcctgcttttgtttctgaatattagcataggcggcttttgcccactctaaagaaggttgagactgaatttctgaggtttcagaaggagcattagattgtttatcttcaacaacaggaggtttttgttcaatattttccttattctcttttttacggcgaaaccaattaaacataatgattgtgcataaatattcgttaatatattgtaaccctagaaaggaatcggtttcaggtttatccccagagaatgtgaacctttacagaaagtaaaaagtctaaaatcgtagcaacaataaatcacagaaattgagatgaattcttataccgtgggtacttatttagccgaacgcttagtgcaaattggtttaaaacatcattttgccgtggctggggactataatttagtgttattggataacttattattaaataaaaacatggaacaagtgtattgttgtaatgaattaaattgtggtttttctgctgaaggttatgctagagctaaaggtgcagctgctgctgttgttacttattctgtgggtgctttatctgcttttgatgctattggtggtgcttatgccgaaaatttacccgtgattttaatttctggtgcccctaataataatgatcatgccgctggacatgttttacatcatgccttaggtaaaaccgattatcattatcaattagaaatggccaaaaatattactgctgctgccgaagctatttatactcctgaagaagcccctgccaaaattgatcatgtgattaaaaccgccttacgcgaaaaaaaacccgtgtatttagaaattgcctgtaatattgcttctatgccttgtgctgctcctgggcctgcttctgctttatttaatgatgaagcctctgatgaagctagtttaaatgctgccgtggaagaaaccttaaaatttattgccaatcgcgataaagttgccgtgttagttggttctaaattaagagctgctggtgctgaagaagctgctgttaaatttgctgatgctttaggtggtgcagttgctactatggctgctgccaaatctttttttcccgaagaaaatccccattatattggaactagttggggagaagtttcttatcctggtgtggaaaaaactatgaaagaagccgacgctgttattgctttagcccctgtgtttaatgattattctaccactggttggactgatattcccgatcccaaaaaattagttttagccgaacctcgttctgttgttgttaatggtgttcgctttccctctgtgcatttaaaagattatttaacccgcttagcccaaaaagtttctaaaaaaactggtgccttagatttttttaaatctttaaatgcgggtgaattaaaaaaagctgctcctgctgatccttctgctcctttagttaatgctgaaattgcccgtcaagttgaagccttattaacccctaatactaccgttattgccgaaactggtgattcttggtttaatgcccaacgcatgaaattacctaatggtgcccgtgttgaatatgaaatgcaatggggtcatattggttggtctgtacctgctgcttttggttatgctgttggtgctcctgaacgtcgtaatattttaatggtgggtgatggttcttttcaattaactgcccaagaagttgcccaaatggttcgcttaaaattacccgttattatttttttaataaataattatggttataccattgaagtgatgattcatgatgggccatataataatattaaaaattgggattatgcgggtttaatggaagtgtttaatggtaatggtggttatgattctggtgctggtaaaggtttaaaagccaaaactggtggtgaattagctgaagctattaaagttgccttagccaatactgatgggccaaccttaattgaatgttttattggtcgcgaagattgtaccgaagaattagttaaatggggtaaacgtgttgctgctgctaattctcgcaaacccgtgaataaattattgtaatttttggggatcaattcgagctcagcaagtttcatcccgaccccctcagggtcgggatttttttattgtactagttgacataagtaaaggcatcccctgcgtgatataattaccttcagtttaaggaggtatacacatatgagtgaaactaaatttaaagcctatgccgtaatgaatcctggtgaaaaattacaaccctgggaatatgaacctgctcctttacaggtagatgaaattgaagtaagagttactcacaatggtttatgtcacactgacttacacatgagagataatgactggaatgttagtgagttccccttagtagcaggtcatgaagttgttggtgaagtaaccgctgttggtgaaaaagtaaccagtcgtaaaaaaggtgatagagttggtgtaggttggattcgtaattcttgtcgcgcttgtgaccattgtttacaaggagaagagaacatttgtagagagggttatactggtttaattgttggtcatcacggtggatttgctgatcgtgtacgtgtacctgctgacttcacttataaaattcctgatgctttagatagtgcatctgctgctcctttattatgtgccggtattaccgtttacactcctttaagaacctacattaaacatcccggtatgaaagtaggtgttatgggtattggaggattaggacatttagctattaaatttgctcgtgcaatgggagcagaagttactgcctttagtaccagtcctaataaagaagcccaagccaaagaatttggtgctcatcatttccaacaatggggtactgctgaagaaatgaaagctgttgccggtaattttgatttagttttatctaccatctctgctgaaactgactgggatgctgccttctctttattagcaaataacggtgttttatgtttcgtaggtattcccgttagttctttaaatgttcctttaattcctttaattttcggacaaaaatctgttgtaggttctgtagttggaggaagaagattcatggcagaaatgttagagttcgccgctgtaaatcagattaaacctatgatcgaaactatgcccttatctcaagtaaatgaagctatggataaagttgccgccaataaagccagatatagaattgtattattatctgaataactagatctcctgcagagaatataaaaagccagattattaatccggcttttttattatttaaatactgtgcacgatcctgcaggatcatcttgctgaaaaactcgagcgctcgttccgcaaagcggtacggagttagttaggggctaatgggcattctcccgtacaggaaagagttagaagttattaattatcaacaattctcctttgcctagtgcatcgttacctttttaattaaaacataaggaaaactaataatcgtaataatttaacctcaaagtgtaaagaaatgtgaaattctgacttttataacgttaaagagggaaaaattagcagtttaaaatacctagagaatagtctggggtaagcatagagaattagattagttaagttaatcaaattcagaaaaaataataatcgtaaatagttaatctgggtgtatagaaaatgatccccttcatgataagatttaaactcgaaaagcaaaagccaaaaaactaacttccattaaaagaagttgttacatataacgctataaagaaaatttatatatttggaggataccaaccatgtctcatattcaacgtgaaactagttgttctcgccctcgtttaaattctaatatggatgccgatttatatggttataaatgggctcgtgataatgttggtcaatctggtgctactatttatcgtttatatggtaaacctgatgctcctgaattattcttgaaacatggtaaaggttctgttgctaatgatgttactgatgaaatggttcgtttaaactggttgactgaatttatgcctttacctactattaaacattttattcgtactcccgatgatgcttggttattaactactgctattcctggtaaaactgcttttcaagttttagaagaatatcctgattctggtgaaaatattgttgatgctttagctgtttttttacgtcgtttacattctattcccgtttgtaattgtccttttaattctgatcgtgtttttcgtttagctcaagctcaatctcgtatgaataatggtttagttgatgcttctgattttgatgatgaacgtaatggttggcctgttgaacaagtttggaaagaaatgcacaaattgttacctttttctcctgattctgttgttactcatggtgatttttctttagataatttgatctttgatgaaggtaaattgattggttgtattgatgttggtcgtgttggtattgctgatcgttatcaagatttagctattttatggaattgtttaggtgaattttctccttctttacagaaacgtttatttcagaaatatggtattgataatcctgatatgaacaagttacaatttcatttaatgttggacgagttcttttaagaattaattcatgaccaaaatcccttaacgtgagttttcgttccactgagcgtcagaccccgtagaaaagatcaaaggatcttcttgagatcctttttttctgcgcgtaatctgctgctatttaaattacgtacacgtgttattactttgttaacgacaattgtcttaattaactgggcctcatgggccttccgctcactgcccgctttccagtcgggaaacctgtcgtgccagctctgcagatgacggtgaaaacctctgacacatgcagctcccggagacggtcacagcttgtctgtaagcggatgccgggagcagacaagcccgtcagggcgcgtcagcgggtgttggcgggtgtcggggcgcagccatgacccagtcacgtagcgatagcggagtgtatactggcttaactatgcggcatcagagcagattgtactgagagtgcaccatatgcggtgtgaaataccgcacagatgcgtaaggagaaaataccgcatcaggcgctcttccgcttcctcgctcactgactcgctgcgctcggtcgttcggctgcggcgagcggtatcagctcactcaaaggcggtaatacggttatccacagaatcaggggataacgcaggaaagaacatgtgagcaaaaggccagcaaaaggccaggaaccgtaaaaaggccgcgttgctggcgtttttccataggctccgcccccctgacgagcatcacaaaaatcgacgctcaagtcagaggtggcgaaacccgacaggactataaagataccaggcgtttccccctggaagctccctcgtgcgctctcctgttccgaccctgccgcttaccggatacctgtccgcctttctcccttcgggaagcgtggcgctttctcatagctcacgctgtaggtatctcagttcggtgtaggtcgttcgctccaagctgggctgtgtgcacgaaccccccgttcagcccgaccgctgcgccttatccggtaactatcgtcttgagtccaacccggtaagacacgacttatcgccactggcagcagccactggtaacaggattagcagagcgaggtatgtaggcggtgctacagagttcttgaagtggtggcctaactacggctacactagaaggacagtatttggtatctgcgctctgctgaagccagttaccttcggaaaaagagttggtagctcttgatccggcaaacaaaccaccgctggtagcggtggtttttttgtttgcaagcagcagattacgcgcagaaaaaaaggatctcaagaagatcctttgatcttttctactgcagaagcttgttagacaccctgtcatgtattttatattatttatttcaccatacggattaagtgaaacctaatgaaaatagtactttcggagctttaactttaatgaaggtatgtttttttatagacatcgatgtctggtttaacaataggaaaaagtagctaaaactcccatgaattaaagaaataacaaggtgtctaacaacctgttattaagaatgttagaaaagacttaacatttgtgttgagtttttatagacattggtgtctagacatacggtagataaggtttgctcaaaaataaaataaaaaaagattggactaaaaaacatttaatttagtacaatttaattagttattttttcgtctcaaattttgctttgttgagcagaaatttagataaaaaaatccccgtgatcagattacaatgtcgttcattgtacgatgtgtcgaaaaatctttacgacactctaaactgaccacacgggggaaaaagaaaactgaactaataacatcatgatactcggaaaacctagcaattctcaacccctaaacaaaagaaacttccaaaaccctgaccatataaaggagtggcaacaatcagcaatcagtcaagatttgatagcagaaaatcttgtatcggttgctaatggttttgatgtactatttatcggcaataaataccgaactaacacgggtgttctgtcacggcacatattaaactcctattctcatttagaagatggtggttcgtatggtagaacatttgacccatttaccaataaagaaatgcagtgggttcaatttaaaccgaatagaccaagaaaaggttctactggtaaggtaatcaaatatgaatcgccaaaaggtgaacctacaagagttctaatgccgtttgtgcctatgaaaatatggcaacggattagcgataagttcggagtaccgattaatccgaaaaaagatactcacttttgggaatgggtaaagaataatccatcgataccgattgccattacagaaggaaataaaaaagctaattgcctattatcctatggctatcctgctattgcctttgtaggcatttggaacggattagagaaaataaatgatttctcgaaggaaaagcagttaaaagaggatttgaaatggttgttatccaacggcaaccgaaatattaatatcatctttgaccaagaccagaaacaaaaaactgtaattaatgtaaacaaagctattttcgctttatcttctctaataagtagaaatggtcataaagttaatattgtgcaatggttgccgtcaaaaggtaaaggaatagatgattatttggtagctttaccttttgagaaaagagaaaatcatttagacaacttaattaaaattgcaccatcatttaatttttggtcaactaaatacttattcaagtgtcgtaaaccagatttaaccgtaaattgccgttatttgagcgatgcagtaaaagaattacctcaagaggatatagcattaatagcacctcacggcacgggtaaaacttcattagtagctactcacgttaagaatcggagttatcacggaaggaaaactatttcattggtgcatcttgaaagtttagccaaagctaatggcaacgcacttggattatattaccgaaccgaaaataatattgaaaagcaatatcttggatttagcttatgtgtagatagttgccgtgataagattaacggcattacaactgatattatttcaggtcaagattattgccttttcattgatgaaattgaccaagtaattccacacatccttaacagtgaaactgaagtaagtaagtatagatgcaccatcattgacactttttctgaactggtgagaaatgctgaacaggtcattattgctgatgctgatttatccgatgtgacgattgacctaatagaaaacatcagaggtaaaaaactatatgtaatcaagaatgaatatcagtatcagggaatgacttttaacgccgttggttcaccattagaaatgatggcaatgatgggaaaatcggtgtcagaaggcaagaaattatttattaacaccacatcccaaaaggcaaaaagtaagtacggcacaatcgctcttgagtcttatatttttggtctaaataaagaagcaaagatattaagaatagactctgaaaccactaaaaaccctgaacatccagcctataaaatcattgaccaagacttaaataatatcctcaaagattatgattatgtcattgcctcaccttgccttcaaacaggtgtcagtattaccttaaaagggcattttgaccagcaatttaacttttccagtggaaacattacacctcattgctttttacagcaaatgtggcggttgagggatgcagaaattgaaagattctattatgtgccgaactcatctaacctcaatctcattgggaataagtcaagttcaccatcagaccttctaaagagcaataacaagatggcaacggcaacggttaaccttttgggtagaatcgactccgaatattccctagagtatgaatcgcacggcatttggcttgagacgtgggcaaaattatcagcacggcataacagttcaatgcgttgttactctgaaattcttacctatctaattacgtctcaagggcataaattaaatatcaacattccctcacctcttgcagatattaagaagctaaatgatgaggtaagtagtaacagggaaaaggtaaaaaatgagagatactctcagaggttaaactcaccagatattaacgatgcagaagctaccatactcgaatctaaagagcaaaaaatcggattgactctcaatgagagatgcaccctagaaaagcataaagttaagaagcggtatgggaatgtaaagatggatattctcacctttgatgatgatggactataccccaaactcagactattttattacctcaccatcggtaaacctcatctcaaggctaatgacagaaaagctattgccaaaatgggcaatgacaataaaggcaagattctatcaaaagacttagttaataaaacttactccgctcgtgtgaaggtcttagagattcttaaactaactgactttatcgacaatcttagagatgaactcttaataactcccaataatccagctatcaccgattttaataatcttctgctaagagctaagaaggatttaagagtattaggagtcaacatcggaaaatatccaatggccaacattaatgccgtacttactctcattggtcacaaactttctgtaatgagagatgagttcggaaaagagaaaaggataaaagtagatggtaaatcataccgatgttatcaacttgaaacattaccagattttaccaatgatactcttgactactggttagaaaatgatagccaaaaagaagtaacagcaacagaaaattactccgaaaattttaacccttcaaatagctacaatccagacagtaagacactttcagagggtgcaaatttcctatatataaataaagaagaattgcatccaaataaattgcacctagaaataaaagaaggtgctgaactttttttattcggggtaaaggtgattgtgaaaggaatcttggacggggcagtaactatattctctatgggtcaagaatacgatttatccctcaatgaactagaggggatgttaacatcatgaactttacaagaatctttttaaagggcgatcgcaccatgttaaatgatggtacatttgttcagatatttgatatttaccatgaccacgcattgggagtgacccttgaccttaagacagaaaaaattatttccgatgatgttagggtaattactgtcaaagacttattgttcgatggcacttataaaggggtaaaatcttttatgcccgataatgcccgataatgcccgattgatgctacaaaatcccataatcataagcgataatcccctaatagcttgtaattcttgaaccgtagcgattttagagtattccaaaaagaagaaataaacaccgcaaaatgtcgtatttcacatatataaaccaaggttttttgccctaaaatctttatgtttgtagtgtgatgttgggtcaaaatggtcagaaaagttgcaaggtttttatggatgcttacgcgcgcgaggggtaagcatccccaaatagttactttatcctagtccatgcccatttattgccgtcccgttcggctttaaaaaagtgccaaaactcacaaggtgcaataaaaagttctgtacctttcgcaaccctagataatctttcaacagttactttttttcctattatctcggtacaaagtttggctagtttctcttttccctctttttcaatcaagccttcttgtatgcccaactcattgattaatctctctatttttaccattatttcccgttcaggtagtttatcccctaaatcttcatcggggggcaatgtagggcattctgaaggggctttttcttctgtctggacattatctaatattgaagtaaccaaactatcttcagttttttctattcctattaattcatattcggttactgtatccgtatcaatatccgaataactatctttatccgtattagctattcggttaagtttatccgttaactcagaaacaagactatatagcggttttagcttttcttctatcctgttatctaatacggataagtttatacggttatcattatccgtattagtatcattgggcttttttggtagttctaccccctcataaaccgcttttattcccaattccaacagactgataacagtatcctttataatgggttttttgctgatatggtgaacttttgccccttccatcattgcgatactttctatctcactcatcaacttatcgcttaagtgaatctcgtatctgtttaatcccttactggttttattcatatccgtttactttattcggttaacaattctattttatacgaataaaatattatacggttaactttatacgtttaactattttatctatacggataacagtaataagttattcgtattagttatacgtttacttttatccaaataaaattagtgcatttaaactaaaagaatgattttatcggagttgatagcattggattaacctaaagatgtttataagctatatctgataagtatttaaggttattttgttattctgtttattgacattatcagaataaaagaatagaatataattgttgagagataagaggtttaagtgattatggttaagaagttagttggttatgtcagggtcagtagtgaatcgcaagaggataacactagcttacagaatcagatagagagaattgaagcatattgtatggcttttggttatgagttggtaaaaatattcaaagaggttgccactggtacaaaagcagatattgaaacccgtcctatttttaatgaagctatagaatacttgaaacaggataatgctaatggaattattgccttgaagctagaccgaatcgcacggaatgctttagatgtattgcgtttggttcgtgaaaccttagaaccacaaaataaaatgttagtgttactagatattcaggtagatacttcgacaccttcaggaaaaatgattttaactgtaatgagtgccgttgctgaactcgaaagagacatgatctatgatcgcactcaggggggtagaaagactaaagcccaaaagggcgggtatgcctacgggaaacctaaatttggctataagactgaagaaaaggaactaaaagaagattcagcacaacaggaaactattaaactaattaagagacaccgtaggtcagggaaaagctaccagaaaatagctgattatctcaatgcccaaagtattcccactaaacaaggtaagaaatggagttctagcgtcgtctatcgaatctgtcaggaaaaagctggttaagtctgtttatagatatttagaatttattgaataaaaatagtatgaacaataaatatttatggactaaccacgctcggaaacgtttaactgaacgatgggaaataaaagaatcatgggttattgataccatcgaaaatcctgaacgttcagaatttattgttgatgagtcaggggaaaaatatcattactataaaagaatagctaagtttaagaatagagtgttagaagtgataacttctgccaactcaacacccacaagaataataaccttttactttaaccgtaacatgaggaaaaatttatgattgttacttacgataatgaagttgacgcaatttattttaagttaacggaaaataaaattgatagcaccgaacctcaaacagacaggattatcattgattacgatgaaagtaataatattgttggcattgaggtattagattttaattatcttgtcaagaaaggtttaaccgttgctgatttacctttttctgaagatgaaagattaacagcttctcaatattttaattttcctgttgctatctaatccagaaggggcaataatccccttctttcatcgagttagacttaatatcacaaaagtcattttcattttaccgtttcttttccacagcgtccgtacgcccctcgttaaatctcaaaaccgacaatttatgatgtttataaaaagttactcactttaataagtatttatactcattaaagggttattctttttttgtagcctgataggttgggaaggaatatttcagattatcagatttgttgaatatttttcgtcagatacgcaaaccttacaaacataattaacaactgaaactattgatatgtctaggttttagctctatcacaggttggatctg

SEQ ID NO: 64 - DNA, 12814 bp, Cyanobacterium sp. ABICyano1
tcgactaatatagtgattattataaatgcaatgtgaatcaaacctatattttaccgtacattgaccatggaacttaatttgaggtgattagtagagggtgcgatcgccctatttgtcaaataataaagataacatttgacattgctgattgaagacataaaacacagaaaaaatcaggtaaaaatataaagctaaagtctaaatatggtttacttttgccttcgacttacaacaaaaaatcatagctagaatcaccaacgcctaatattttatttagctgaaattttgggatgaactttttgtaaaaatcgggggtctaaaaatatagcaaccacgatattaaataactgagtgattattttaatctattgggggcttattaactaaatacttgcatttttatggagggttttaattatgaattcttataccgtgggtacttatttagccgaacgcttagtgcaaattggtttaaaacatcattttgccgtggctggggactataatttagtgttattggataacttattattaaataaaaacatggaacaagtgtattgttgtaatgaattaaattgtggtttttctgctgaaggttatgctagagctaaaggtgcagctgctgctgttgttacttattctgtgggtgctttatctgcttttgatgctattggtggtgcttatgccgaaaatttacccgtgattttaatttctggtgcccctaataataatgatcatgccgctggacatgttttacatcatgccttaggtaaaaccgattatcattatcaattagaaatggccaaaaatattactgctgctgccgaagctatttatactcctgaagaagcccctgccaaaattgatcatgtgattaaaaccgccttacgcgaaaaaaaacccgtgtatttagaaattgcctgtaatattgcttctatgccttgtgctgctcctgggcctgcttctgctttatttaatgatgaagcctctgatgaagctagtttaaatgctgccgtggaagaaaccttaaaatttattgccaatcgcgataaagttgccgtgttagttggttctaaattaagagctgctggtgctgaagaagctgctgttaaatttgctgatgctttaggtggtgcagttgctactatggctgctgccaaatctttttttcccgaagaaaatccccattatattggaactagttggggagaagtttcttatcctggtgtggaaaaaactatgaaagaagccgacgctgttattgctttagcccctgtgtttaatgattattctaccactggttggactgatattcccgatcccaaaaaattagttttagccgaacctcgttctgttgttgttaatggtgttcgctttccctctgtgcatttaaaagattatttaacccgcttagcccaaaaagtttctaaaaaaactggtgccttagatttttttaaatctttaaatgcgggtgaattaaaaaaagctgctcctgctgatccttctgctcctttagttaatgctgaaattgcccgtcaagttgaagccttattaacccctaatactaccgttattgccgaaactggtgattcttggtttaatgcccaacgcatgaaattacctaatggtgcccgtgttgaatatgaaatgcaatggggtcatattggttggtctgtacctgctgcttttggttatgctgttggtgctcctgaacgtcgtaatattttaatggtgggtgatggttcttttcaattaactgcccaagaagttgcccaaatggttcgcttaaaattacccgttattatttttttaataaataattatggttataccattgaagtgatgattcatgatgggccatataataatattaaaaattgggattatgcgggtttaatggaagtgtttaatggtaatggtggttatgattctggtgctggtaaaggtttaaaagccaaaactggtggtgaattagctgaagctattaaagttgccttagccaatactgatgggccaaccttaattgaatgttttattggtcgcgaagattgtaccgaagaattagttaaatggggtaaacgtgttgctgctgctaattctcgcaaacccgtgaataaattattgtaatttttggggatcaattcgagctcagcaagtttcatcccgaccccctcagggtcgggatttttttattgtactagttgacataagtaaaggcatcccctgcgtgatataattaccttcagtttaaggaggtatacacatatgagtgaaactaaatttaaagcctatgccgtaatgaatcctggtgaaaaattacaaccctgggaatatgaacctgctcctttacaggtagatgaaattgaagtaagagttactcacaatggtttatgtcacactgacttacacatgagagataatgactggaatgttagtgagttccccttagtagcaggtcatgaagttgttggtgaagtaaccgctgttggtgaaaaagtaaccagtcgtaaaaaaggtgatagagttggtgtaggttggattcgtaattcttgtcgcgcttgtgaccattgtttacaaggagaagagaacatttgtagagagggttatactggtttaattgttggtcatcacggtggatttgctgatcgtgtacgtgtacctgctgacttcacttataaaattcctgatgctttagatagtgcatctgctgctcctttattatgtgccggtattaccgtttacactcctttaagaacctacattaaacatcccggtatgaaagtaggtgttatgggtattggaggattaggacatttagctattaaatttgctcgtgcaatgggagcagaagttactgcctttagtaccagtcctaataaagaagcccaagccaaagaatttggtgctcatcatttccaacaatggggtactgctgaagaaatgaaagctgttgccggtaattttgatttagttttatctaccatctctgctgaaactgactgggatgctgccttctctttattagcaaataacggtgttttatgtttcgtaggtattcccgttagttctttaaatgttcctttaattcctttaattttcggacaaaaatctgttgtaggttctgtagttggaggaagaagattcatggcagaaatgttagagttcgccgctgtaaatcagattaaacctatgatcgaaactatgcccttatctcaagtaaatgaagctatggataaagttgccgccaataaagccagatatagaattgtattattatctgaataactagatctcctgcagagaatataaaaagccagattattaatccggcttttttattatttaaatactgtgcacgatcctgcaggatcatcttgctgaaaaactcgagcgctcgttccgcaaagcggtacggagttagttaggggctaatgggcattctcccgtacaggaaagagttagaagttattaattatcaacaattctcctttgcctagtgcatcgttacctttttaattaaaacataaggaaaactaataatcgtaataatttaacctcaaagtgtaaagaaatgtgaaattctgacttttataacgttaaagagggaaaaattagcagtttaaaatacctagagaatagtctggggtaagcatagagaattagattagttaagttaatcaaattcagaaaaaataataatcgtaaatagttaatctgggtgtatagaaaatgatccccttcatgataagatttaaactcgaaaagcaaaagccaaaaaactaacttccattaaaagaagttgttacatataacgctataaagaaaatttatatatttggaggataccaaccatgtctcatattcaacgtgaaactagttgttctcgccctcgtttaaattctaatatggatgccgatttatatggttataaatgggctcgtgataatgttggtcaatctggtgctactatttatcgtttatatggtaaacctgatgctcctgaattattcttgaaacatggtaaaggttctgttgctaatgatgttactgatgaaatggttcgtttaaactggttgactgaatttatgcctttacctactattaaacattttattcgtactcccgatgatgcttggttattaactactgctattcctggtaaaactgcttttcaagttttagaagaatatcctgattctggtgaaaatattgttgatgctttagctgtttttttacgtcgtttacattctattcccgtttgtaattgtccttttaattctgatcgtgtttttcgtttagctcaagctcaatctcgtatgaataatggtttagttgatgcttctgattttgatgatgaacgtaatggttggcctgttgaacaagtttggaaagaaatgcacaaattgttacctttttctcctgattctgttgttactcatggtgatttttctttagataatttgatctttgatgaaggtaaattgattggttgtattgatgttggtcgtgttggtattgctgatcgttatcaagatttagctattttatggaattgtttaggtgaattttctccttctttacagaaacgtttatttcagaaatatggtattgataatcctgatatgaacaagttacaatttcatttaatgttggacgagttcttttaagaattaattcatgaccaaaatcccttaacgtgagttttcgttccactgagcgtcagaccccgtagaaaagatcaaaggatcttcttgagatcctttttttctgcgcgtaatctgctgctatttaaattacgtacacgtgttattactttgttaacgacaattgtcttaattaactgggcctcatgggccttccgctcactgcccgctttccagtcgggaaacctgtcgtgccagctctgcagatgacggtgaaaacctctgacacatgcagctcccggagacggtcacagcttgtctgtaagcggatgccgggagcagacaagcccgtcagggcgcgtcagcgggtgttggcgggtgtcggggcgcagccatgacccagtcacgtagcgatagcggagtgtatactggcttaactatgcggcatcagagcagattgtactgagagtgcaccatatgcggtgtgaaataccgcacagatgcgtaaggagaaaataccgcatcaggcgctcttccgcttcctcgctcactgactcgctgcgctcggtcgttcggctgcggcgagcggtatcagctcactcaaaggcggtaatacggttatccacagaatcaggggataacgcaggaaagaacatgtgagcaaaaggccagcaaaaggccaggaaccgtaaaaaggccgcgttgctggcgtttttccataggctccgcccccctgacgagcatcacaaaaatcgacgctcaagtcagaggtggcgaaacccgacaggactataaagataccaggcgtttccccctggaagctccctcgtgcgctctcctgttccgaccctgccgcttaccggatacctgtccgcctttctcccttcgggaagcgtggcgctttctcatagctcacgctgtaggtatctcagttcggtgtaggtcgttcgctccaagctgggctgtgtgcacgaaccccccgttcagcccgaccgctgcgccttatccggtaactatcgtcttgagtccaacccggtaagacacgacttatcgccactggcagcagccactggtaacaggattagcagagcgaggtatgtaggcggtgctacagagttcttgaagtggtggcctaactacggctacactagaaggacagtatttggtatctgcgctctgctgaagccagttaccttcggaaaaagagttggtagctcttgatccggcaaacaaaccaccgctggtagcggtggtttttttgtttgcaagcagcagattacgcgcagaaaaaaaggatctcaagaagatcctttgatcttttctactgcagaagcttgttagacaccctgtcatgtattttatattatttatttcaccatacggattaagtgaaacctaatgaaaatagtactttcggagctttaactttaatgaaggtatgtttttttatagacatcgatgtctggtttaacaataggaaaaagtagctaaaactcccatgaattaaagaaataacaaggtgtctaacaacctgttattaagaatgttagaaaagacttaacatttgtgttgagtttttatagacattggtgtctagacatacggtagataaggtttgctcaaaaataaaataaaaaaagattggactaaaaaacatttaatttagtacaatttaattagttattttttcgtctcaaattttgctttgttgagcagaaatttagataaaaaaatccccgtgatcagattacaatgtcgttcattgtacgatgtgtcgaaaaatctttacgacactctaaactgaccacacgggggaaaaagaaaactgaactaataacatcatgatactcggaaaacctagcaattctcaacccctaaacaaaagaaacttccaaaaccctgaccatataaaggagtggcaacaatcagcaatcagtcaagatttgatagcagaaaatcttgtatcggttgctaatggttttgatgtactatttatcggcaataaataccgaactaacacgggtgttctgtcacggcacatattaaactcctattctcatttagaagatggtggttcgtatggtagaacatttgacccatttaccaataaagaaatgcagtgggttcaatttaaaccgaatagaccaagaaaaggttctactggtaaggtaatcaaatatgaatcgccaaaaggtgaacctacaagagttctaatgccgtttgtgcctatgaaaatatggcaacggattagcgataagttcggagtaccgattaatccgaaaaaagatactcacttttgggaatgggtaaagaataatccatcgataccgattgccattacagaaggaaataaaaaagctaattgcctattatcctatggctatcctgctattgcctttgtaggcatttggaacggattagagaaaataaatgatttctcgaaggaaaagcagttaaaagaggatttgaaatggttgttatccaacggcaaccgaaatattaatatcatctttgaccaagaccagaaacaaaaaactgtaattaatgtaaacaaagctattttcgctttatcttctctaataagtagaaatggtcataaagttaatattgtgcaatggttgccgtcaaaaggtaaaggaatagatgattatttggtagctttaccttttgagaaaagagaaaatcatttagacaacttaattaaaattgcaccatcatttaatttttggtcaactaaatacttattcaagtgtcgtaaaccagatttaaccgtaaattgccgttatttgagcgatgcagtaaaagaattacctcaagaggatatagcattaatagcacctcacggcacgggtaaaacttcattagtagctactcacgttaagaatcggagttatcacggaaggaaaactatttcattggtgcatcttgaaagtttagccaaagctaatggcaacgcacttggattatattaccgaaccgaaaataatattgaaaagcaatatcttggatttagcttatgtgtagatagttgccgtgataagattaacggcattacaactgatattatttcaggtcaagattattgccttttcattgatgaaattgaccaagtaattccacacatccttaacagtgaaactgaagtaagtaagtatagatgcaccatcattgacactttttctgaactggtgagaaatgctgaacaggtcattattgctgatgctgatttatccgatgtgacgattgacctaatagaaaacatcagaggtaaaaaactatatgtaatcaagaatgaatatcagtatcagggaatgacttttaacgccgttggttcaccattagaaatgatggcaatgatgggaaaatcggtgtcagaaggcaagaaattatttattaacaccacatcccaaaaggcaaaaagtaagtacggcacaatcgctcttgagtcttatatttttggtctaaataaagaagcaaagatattaagaatagactctgaaaccactaaaaaccctgaacatccagcctataaaatcattgaccaagacttaaataatatcctcaaagattatgattatgtcattgcctcaccttgccttcaaacaggtgtcagtattaccttaaaagggcattttgaccagcaatttaacttttccagtggaaacattacacctcattgctttttacagcaaatgtggcggttgagggatgcagaaattgaaagattctattatgtgccgaactcatctaacctcaatctcattgggaataagtcaagttcaccatcagaccttctaaagagcaataacaagatggcaacggcaacggttaaccttttgggtagaatcgactccgaatattccctagagtatgaatcgcacggcatttggcttgagacgtgggcaaaattatcagcacggcataacagttcaatgcgttgttactctgaaattcttacctatctaattacgtctcaagggcataaattaaatatcaacattccctcacctcttgcagatattaagaagctaaatgatgaggtaagtagtaacagggaaaaggtaaaaaatgagagatactctcagaggttaaactcaccagatattaacgatgcagaagctaccatactcgaatctaaagagcaaaaaatcggattgactctcaatgagagatgcaccctagaaaagcataaagttaagaagcggtatgggaatgtaaagatggatattctcacctttgatgatgatggactataccccaaactcagactattttattacctcaccatcggtaaacctcatctcaaggctaatgacagaaaagctattgccaaaatgggcaatgacaataaaggcaagattctatcaaaagacttagttaataaaacttactccgctcgtgtgaaggtcttagagattcttaaactaactgactttatcgacaatcttagagatgaactcttaataactcccaataatccagctatcaccgattttaataatcttctgctaagagctaagaaggatttaagagtattaggagtcaacatcggaaaatatccaatggccaacattaatgccgtacttactctcattggtcacaaactttctgtaatgagagatgagttcggaaaagagaaaaggataaaagtagatggtaaatcataccgatgttatcaacttgaaacattaccagattttaccaatgatactcttgactactggttagaaaatgatagccaaaaagaagtaacagcaacagaaaattactccgaaaattttaacccttcaaatagctacaatccagacagtaagacactttcagagggtgcaaatttcctatatataaataaagaagaattgcatccaaataaattgcacctagaaataaaagaaggtgctgaactttttttattcggggtaaaggtgattgtgaaaggaatcttggacggggcagtaactatattctctatgggtcaagaatacgatttatccctcaatgaactagaggggatgttaacatcatgaactttacaagaatctttttaaagggcgatcgcaccatgttaaatgatggtacatttgttcagatatttgatatttaccatgaccacgcattgggagtgacccttgaccttaagacagaaaaaattatttccgatgatgttagggtaattactgtcaaagacttattgttcgatggcacttataaaggggtaaaatcttttatgcccgataatgcccgataatgcccgattgatgctacaaaatcccataatcataagcgataatcccctaatagcttgtaattcttgaaccgtagcgattttagagtattccaaaaagaagaaataaacaccgcaaaatgtcgtatttcacatatataaaccaaggttttttgccctaaaatctttatgtttgtagtgtgatgttgggtcaaaatggtcagaaaagttgcaaggtttttatggatgcttacgcgcgcgaggggtaagcatccccaaatagttactttatcctagtccatgcccatttattgccgtcccgttcggctttaaaaaagtgccaaaactcacaaggtgcaataaaaagttctgtacctttcgcaaccctagataatctttcaacagttactttttttcctattatctcggtacaaagtttggctagtttctcttttccctctttttcaatcaagccttcttgtatgcccaactcattgattaatctctctatttttaccattatttcccgttcaggtagtttatcccctaaatcttcatcggggggcaatgtagggcattctgaaggggctttttcttctgtctggacattatctaatattgaagtaaccaaactatcttcagttttttctattcctattaattcatattcggttactgtatccgtatcaatatccgaataactatctttatccgtattagctattcggttaagtttatccgttaactcagaaacaagactatatagcggttttagcttttcttctatcctgttatctaatacggataagtttatacggttatcattatccgtattagtatcattgggcttttttggtagttctaccccctcataaaccgcttttattcccaattccaacagactgataacagtatcctttataatgggttttttgctgatatggtgaacttttgccccttccatcattgcgatactttctatctcactcatcaacttatcgcttaagtgaatctcgtatctgtttaatcccttactggttttattcatatccgtttactttattcggttaacaattctattttatacgaataaaatattatacggttaactttatacgtttaactattttatctatacggataacagtaataagttattcgtattagttatacgtttacttttatccaaataaaattagtgcatttaaactaaaagaatgattttatcggagttgatagcattggattaacctaaagatgtttataagctatatctgataagtatttaaggttattttgttattctgtttattgacattatcagaataaaagaatagaatataattgttgagagataagaggtttaagtgattatggttaagaagttagttggttatgtcagggtcagtagtgaatcgcaagaggataacactagcttacagaatcagatagagagaattgaagcatattgtatggcttttggttatgagttggtaaaaatattcaaagaggttgccactggtacaaaagcagatattgaaacccgtcctatttttaatgaagctatagaatacttgaaacaggataatgctaatggaattattgccttgaagctagaccgaatcgcacggaatgctttagatgtattgcgtttggttcgtgaaaccttagaaccacaaaataaaatgttagtgttactagatattcaggtagatacttcgacaccttcaggaaaaatgattttaactgtaatgagtgccgttgctgaactcgaaagagacatgatctatgatcgcactcaggggggtagaaagactaaagcccaaaagggcgggtatgcctacgggaaacctaaatttggctataagactgaagaaaaggaactaaaagaagattcagcacaacaggaaactattaaactaattaagagacaccgtaggtcagggaaaagctaccagaaaatagctgattatctcaatgcccaaagtattcccactaaacaaggtaagaaatggagttctagcgtcgtctatcgaatctgtcaggaaaaagctggttaagtctgtttatagatatttagaatttattgaataaaaatagtatgaacaataaatatttatggactaaccacgctcggaaacgtttaactgaacgatgggaaataaaagaatcatgggttattgataccatcgaaaatcctgaacgttcagaatttattgttgatgagtcaggggaaaaatatcattactataaaagaatagctaagtttaagaatagagtgttagaagtgataacttctgccaactcaacacccacaagaataataaccttttactttaaccgtaacatgaggaaaaatttatgattgttacttacgataatgaagttgacgcaatttattttaagttaacggaaaataaaattgatagcaccgaacctcaaacagacaggattatcattgattacgatgaaagtaataatattgttggcattgaggtattagattttaattatcttgtcaagaaaggtttaaccgttgctgatttacctttttctgaagatgaaagattaacagcttctcaatattttaattttcctgttgctatctaatccagaaggggcaataatccccttctttcatcgagttagacttaatatcacaaaagtcattttcattttaccgtttcttttccacagcgtccgtacgcccctcgttaaatctcaaaaccgacaatttatgatgtttataaaaagttactcactttaataagtatttatactcattaaagggttattctttttttgtagcctgataggttgggaaggaatatttcagattatcagatttgttgaatatttttcgtcagatacgcaaaccttacaaacataattaacaactgaaactattgatatgtctaggttttagctctatcacaggttggatctg

SEQ ID NO: 65 - DNA, 12648 bp, Cyanobacterium sp. ABICyano1
tcgacccaatatcttgtcatacatacttatttgcctcactattagccctatatgtctctattgtatttttctttttctcctattcctagatcttgtaatgaatcattactctctgaaatatagctactaattttatggttgtttgtaaaatatattaacaaatgaacaataaatcatattttgtgttaatctaattattagacaactactgaatttatattcagatattcacagataggagaattttgattatgaattcttataccgtgggtacttatttagccgaacgcttagtgcaaattggtttaaaacatcattttgccgtggctggggactataatttagtgttattggataacttattattaaataaaaacatggaacaagtgtattgttgtaatgaattaaattgtggtttttctgctgaaggttatgctagagctaaaggtgcagctgctgctgttgttacttattctgtgggtgctttatctgcttttgatgctattggtggtgcttatgccgaaaatttacccgtgattttaatttctggtgcccctaataataatgatcatgccgctggacatgttttacatcatgccttaggtaaaaccgattatcattatcaattagaaatggccaaaaatattactgctgctgccgaagctatttatactcctgaagaagcccctgccaaaattgatcatgtgattaaaaccgccttacgcgaaaaaaaacccgtgtatttagaaattgcctgtaatattgcttctatgccttgtgctgctcctgggcctgcttctgctttatttaatgatgaagcctctgatgaagctagtttaaatgctgccgtggaagaaaccttaaaatttattgccaatcgcgataaagttgccgtgttagttggttctaaattaagagctgctggtgctgaagaagctgctgttaaatttgctgatgctttaggtggtgcagttgctactatggctgctgccaaatctttttttcccgaagaaaatccccattatattggaactagttggggagaagtttcttatcctggtgtggaaaaaactatgaaagaagccgacgctgttattgctttagcccctgtgtttaatgattattctaccactggttggactgatattcccgatcccaaaaaattagttttagccgaacctcgttctgttgttgttaatggtgttcgctttccctctgtgcatttaaaagattatttaacccgcttagcccaaaaagtttctaaaaaaactggtgccttagatttttttaaatctttaaatgcgggtgaattaaaaaaagctgctcctgctgatccttctgctcctttagttaatgctgaaattgcccgtcaagttgaagccttattaacccctaatactaccgttattgccgaaactggtgattcttggtttaatgcccaacgcatgaaattacctaatggtgcccgtgttgaatatgaaatgcaatggggtcatattggttggtctgtacctgctgcttttggttatgctgttggtgctcctgaacgtcgtaatattttaatggtgggtgatggttcttttcaattaactgcccaagaagttgcccaaatggttcgcttaaaattacccgttattatttttttaataaataattatggttataccattgaagtgatgattcatgatgggccatataataatattaaaaattgggattatgcgggtttaatggaagtgtttaatggtaatggtggttatgattctggtgctggtaaaggtttaaaagccaaaactggtggtgaattagctgaagctattaaagttgccttagccaatactgatgggccaaccttaattgaatgttttattggtcgcgaagattgtaccgaagaattagttaaatggggtaaacgtgttgctgctgctaattctcgcaaacccgtgaataaattattgtaatttttggggatcaattcgagctcagcaagtttcatcccgaccccctcagggtcgggatttttttattgtactagttgacataagtaaaggcatcccctgcgtgatataattaccttcagtttaaggaggtatacacatatgagtgaaactaaatttaaagcctatgccgtaatgaatcctggtgaaaaattacaaccctgggaatatgaacctgctcctttacaggtagatgaaattgaagtaagagttactcacaatggtttatgtcacactgacttacacatgagagataatgactggaatgttagtgagttccccttagtagcaggtcatgaagttgttggtgaagtaaccgctgttggtgaaaaagtaaccagtcgtaaaaaaggtgatagagttggtgtaggttggattcgtaattcttgtcgcgcttgtgaccattgtttacaaggagaagagaacatttgtagagagggttatactggtttaattgttggtcatcacggtggatttgctgatcgtgtacgtgtacctgctgacttcacttataaaattcctgatgctttagatagtgcatctgctgctcctttattatgtgccggtattaccgtttacactcctttaagaacctacattaaacatcccggtatgaaagtaggtgttatgggtattggaggattaggacatttagctattaaatttgctcgtgcaatgggagcagaagttactgcctttagtaccagtcctaataaagaagcccaagccaaagaatttggtgctcatcatttccaacaatggggtactgctgaagaaatgaaagctgttgccggtaattttgatttagttttatctaccatctctgctgaaactgactgggatgctgccttctctttattagcaaataacggtgttttatgtttcgtaggtattcccgttagttctttaaatgttcctttaattcctttaattttcggacaaaaatctgttgtaggttctgtagttggaggaagaagattcatggcagaaatgttagagttcgccgctgtaaatcagattaaacctatgatcgaaactatgcccttatctcaagtaaatgaagctatggataaagttgccgccaataaagccagatatagaattgtattattatctgaataactagatctcctgcagagaatataaaaagccagattattaatccggcttttttattatttaaatactgtgcacgatcctgcaggatcatcttgctgaaaaactcgagcgctcgttccgcaaagcggtacggagttagttaggggctaatgggcattctcccgtacaggaaagagttagaagttattaattatcaacaattctcctttgcctagtgcatcgttacctttttaattaaaacataaggaaaactaataatcgtaataatttaacctcaaagtgtaaagaaatgtgaaattctgacttttataacgttaaagagggaaaaattagcagtttaaaatacctagagaatagtctggggtaagcatagagaattagattagttaagttaatcaaattcagaaaaaataataatcgtaaatagttaatctgggtgtatagaaaatgatccccttcatgataagatttaaactcgaaaagcaaaagccaaaaaactaacttccattaaaagaagttgttacatataacgctataaagaaaatttatatatttggaggataccaaccatgtctcatattcaacgtgaaactagttgttctcgccctcgtttaaattctaatatggatgccgatttatatggttataaatgggctcgtgataatgttggtcaatctggtgctactatttatcgtttatatggtaaacctgatgctcctgaattattcttgaaacatggtaaaggttctgttgctaatgatgttactgatgaaatggttcgtttaaactggttgactgaatttatgcctttacctactattaaacattttattcgtactcccgatgatgcttggttattaactactgctattcctggtaaaactgcttttcaagttttagaagaatatcctgattctggtgaaaatattgttgatgctttagctgtttttttacgtcgtttacattctattcccgtttgtaattgtccttttaattctgatcgtgtttttcgtttagctcaagctcaatctcgtatgaataatggtttagttgatgcttctgattttgatgatgaacgtaatggttggcctgttgaacaagtttggaaagaaatgcacaaattgttacctttttctcctgattctgttgttactcatggtgatttttctttagataatttgatctttgatgaaggtaaattgattggttgtattgatgttggtcgtgttggtattgctgatcgttatcaagatttagctattttatggaattgtttaggtgaattttctccttctttacagaaacgtttatttcagaaatatggtattgataatcctgatatgaacaagttacaatttcatttaatgttggacgagttcttttaagaattaattcatgaccaaaatcccttaacgtgagttttcgttccactgagcgtcagaccccgtagaaaagatcaaaggatcttcttgagatcctttttttctgcgcgtaatctgctgctatttaaattacgtacacgtgttattactttgttaacgacaattgtcttaattaactgggcctcatgggccttccgctcactgcccgctttccagtcgggaaacctgtcgtgccagctctgcagatgacggtgaaaacctctgacacatgcagctcccggagacggtcacagcttgtctgtaagcggatgccgggagcagacaagcccgtcagggcgcgtcagcgggtgttggcgggtgtcggggcgcagccatgacccagtcacgtagcgatagcggagtgtatactggcttaactatgcggcatcagagcagattgtactgagagtgcaccatatgcggtgtgaaataccgcacagatgcgtaaggagaaaataccgcatcaggcgctcttccgcttcctcgctcactgactcgctgcgctcggtcgttcggctgcggcgagcggtatcagctcactcaaaggcggtaatacggttatccacagaatcaggggataacgcaggaaagaacatgtgagcaaaaggccagcaaaaggccaggaaccgtaaaaaggccgcgttgctggcgtttttccataggctccgcccccctgacgagcatcacaaaaatcgacgctcaagtcagaggtggcgaaacccgacaggactataaagataccaggcgtttccccctggaagctccctcgtgcgctctcctgttccgaccctgccgcttaccggatacctgtccgcctttctcccttcgggaagcgtggcgctttctcatagctcacgctgtaggtatctcagttcggtgtaggtcgttcgctccaagctgggctgtgtgcacgaaccccccgttcagcccgaccgctgcgccttatccggtaactatcgtcttgagtccaacccggtaagacacgacttatcgccactggcagcagccactggtaacaggattagcagagcgaggtatgtaggcggtgctacagagttcttgaagtggtggcctaactacggctacactagaaggacagtatttggtatctgcgctctgctgaagccagttaccttcggaaaaagagttggtagctcttgatccggcaaacaaaccaccgctggtagcggtggtttttttgtttgcaagcagcagattacgcgcagaaaaaaaggatctcaagaagatcctttgatcttttctactgcagaagcttgttagacaccctgtcatgtattttatattatttatttcaccatacggattaagtgaaacctaatgaaaatagtactttcggagctttaactttaatgaaggtatgtttttttatagacatcgatgtctggtttaacaataggaaaaagtagctaaaactcccatgaattaaagaaataacaaggtgtctaacaacctgttattaagaatgttagaaaagacttaacatttgtgttgagtttttatagacattggtgtctagacatacggtagataaggtttgctcaaaaataaaataaaaaaagattggactaaaaaacatttaatttagtacaatttaattagttattttttcgtctcaaattttgctttgttgagcagaaatttagataaaaaaatccccgtgatcagattacaatgtcgttcattgtacgatgtgtcgaaaaatctttacgacactctaaactgaccacacgggggaaaaagaaaactgaactaataacatcatgatactcggaaaacctagcaattctcaacccctaaacaaaagaaacttccaaaaccctgaccatataaaggagtggcaacaatcagcaatcagtcaagatttgatagcagaaaatcttgtatcggttgctaatggttttgatgtactatttatcggcaataaataccgaactaacacgggtgttctgtcacggcacatattaaactcctattctcatttagaagatggtggttcgtatggtagaacatttgacccatttaccaataaagaaatgcagtgggttcaatttaaaccgaatagaccaagaaaaggttctactggtaaggtaatcaaatatgaatcgccaaaaggtgaacctacaagagttctaatgccgtttgtgcctatgaaaatatggcaacggattagcgataagttcggagtaccgattaatccgaaaaaagatactcacttttgggaatgggtaaagaataatccatcgataccgattgccattacagaaggaaataaaaaagctaattgcctattatcctatggctatcctgctattgcctttgtaggcatttggaacggattagagaaaataaatgatttctcgaaggaaaagcagttaaaagaggatttgaaatggttgttatccaacggcaaccgaaatattaatatcatctttgaccaagaccagaaacaaaaaactgtaattaatgtaaacaaagctattttcgctttatcttctctaataagtagaaatggtcataaagttaatattgtgcaatggttgccgtcaaaaggtaaaggaatagatgattatttggtagctttaccttttgagaaaagagaaaatcatttagacaacttaattaaaattgcaccatcatttaatttttggtcaactaaatacttattcaagtgtcgtaaaccagatttaaccgtaaattgccgttatttgagcgatgcagtaaaagaattacctcaagaggatatagcattaatagcacctcacggcacgggtaaaacttcattagtagctactcacgttaagaatcggagttatcacggaaggaaaactatttcattggtgcatcttgaaagtttagccaaagctaatggcaacgcacttggattatattaccgaaccgaaaataatattgaaaagcaatatcttggatttagcttatgtgtagatagttgccgtgataagattaacggcattacaactgatattatttcaggtcaagattattgccttttcattgatgaaattgaccaagtaattccacacatccttaacagtgaaactgaagtaagtaagtatagatgcaccatcattgacactttttctgaactggtgagaaatgctgaacaggtcattattgctgatgctgatttatccgatgtgacgattgacctaatagaaaacatcagaggtaaaaaactatatgtaatcaagaatgaatatcagtatcagggaatgacttttaacgccgttggttcaccattagaaatgatggcaatgatgggaaaatcggtgtcagaaggcaagaaattatttattaacaccacatcccaaaaggcaaaaagtaagtacggcacaatcgctcttgagtcttatatttttggtctaaataaagaagcaaagatattaagaatagactctgaaaccactaaaaaccctgaacatccagcctataaaatcattgaccaagacttaaataatatcctcaaagattatgattatgtcattgcctcaccttgccttcaaacaggtgtcagtattaccttaaaagggcattttgaccagcaatttaacttttccagtggaaacattacacctcattgctttttacagcaaatgtggcggttgagggatgcagaaattgaaagattctattatgtgccgaactcatctaacctcaatctcattgggaataagtcaagttcaccatcagaccttctaaagagcaataacaagatggcaacggcaacggttaaccttttgggtagaatcgactccgaatattccctagagtatgaatcgcacggcatttggcttgagacgtgggcaaaattatcagcacggcataacagttcaatgcgttgttactctgaaattcttacctatctaattacgtctcaagggcataaattaaatatcaacattccctcacctcttgcagatattaagaagctaaatgatgaggtaagtagtaacagggaaaaggtaaaaaatgagagatactctcagaggttaaactcaccagatattaacgatgcagaagctaccatactcgaatctaaagagcaaaaaatcggattgactctcaatgagagatgcaccctagaaaagcataaagttaagaagcggtatgggaatgtaaagatggatattctcacctttgatgatgatggactataccccaaactcagactattttattacctcaccatcggtaaacctcatctcaaggctaatgacagaaaagctattgccaaaatgggcaatgacaataaaggcaagattctatcaaaagacttagttaataaaacttactccgctcgtgtgaaggtcttagagattcttaaactaactgactttatcgacaatcttagagatgaactcttaataactcccaataatccagctatcaccgattttaataatcttctgctaagagctaagaaggatttaagagtattaggagtcaacatcggaaaatatccaatggccaacattaatgccgtacttactctcattggtcacaaactttctgtaatgagagatgagttcggaaaagagaaaaggataaaagtagatggtaaatcataccgatgttatcaacttgaaacattaccagattttaccaatgatactcttgactactggttagaaaatgatagccaaaaagaagtaacagcaacagaaaattactccgaaaattttaacccttcaaatagctacaatccagacagtaagacactttcagagggtgcaaatttcctatatataaataaagaagaattgcatccaaataaattgcacctagaaataaaagaaggtgctgaactttttttattcggggtaaaggtgattgtgaaaggaatcttggacggggcagtaactatattctctatgggtcaagaatacgatttatccctcaatgaactagaggggatgttaacatcatgaactttacaagaatctttttaaagggcgatcgcaccatgttaaatgatggtacatttgttcagatatttgatatttaccatgaccacgcattgggagtgacccttgaccttaagacagaaaaaattatttccgatgatgttagggtaattactgtcaaagacttattgttcgatggcacttataaaggggtaaaatcttttatgcccgataatgcccgataatgcccgattgatgctacaaaatcccataatcataagcgataatcccctaatagcttgtaattcttgaaccgtagcgattttagagtattccaaaaagaagaaataaacaccgcaaaatgtcgtatttcacatatataaaccaaggttttttgccctaaaatctttatgtttgtagtgtgatgttgggtcaaaatggtcagaaaagttgcaaggtttttatggatgcttacgcgcgcgaggggtaagcatccccaaatagttactttatcctagtccatgcccatttattgccgtcccgttcggctttaaaaaagtgccaaaactcacaaggtgcaataaaaagttctgtacctttcgcaaccctagataatctttcaacagttactttttttcctattatctcggtacaaagtttggctagtttctcttttccctctttttcaatcaagccttcttgtatgcccaactcattgattaatctctctatttttaccattatttcccgttcaggtagtttatcccctaaatcttcatcggggggcaatgtagggcattctgaaggggctttttcttctgtctggacattatctaatattgaagtaaccaaactatcttcagttttttctattcctattaattcatattcggttactgtatccgtatcaatatccgaataactatctttatccgtattagctattcggttaagtttatccgttaactcagaaacaagactatatagcggttttagcttttcttctatcctgttatctaatacggataagtttatacggttatcattatccgtattagtatcattgggcttttttggtagttctaccccctcataaaccgcttttattcccaattccaacagactgataacagtatcctttataatgggttttttgctgatatggtgaacttttgccccttccatcattgcgatactttctatctcactcatcaacttatcgcttaagtgaatctcgtatctgtttaatcccttactggttttattcatatccgtttactttattcggttaacaattctattttatacgaataaaatattatacggttaactttatacgtttaactattttatctatacggataacagtaataagttattcgtattagttatacgtttacttttatccaaataaaattagtgcatttaaactaaaagaatgattttatcggagttgatagcattggattaacctaaagatgtttataagctatatctgataagtatttaaggttattttgttattctgtttattgacattatcagaataaaagaatagaatataattgttgagagataagaggtttaagtgattatggttaagaagttagttggttatgtcagggtcagtagtgaatcgcaagaggataacactagcttacagaatcagatagagagaattgaagcatattgtatggcttttggttatgagttggtaaaaatattcaaagaggttgccactggtacaaaagcagatattgaaacccgtcctatttttaatgaagctatagaatacttgaaacaggataatgctaatggaattattgccttgaagctagaccgaatcgcacggaatgctttagatgtattgcgtttggttcgtgaaaccttagaaccacaaaataaaatgttagtgttactagatattcaggtagatacttcgacaccttcaggaaaaatgattttaactgtaatgagtgccgttgctgaactcgaaagagacatgatctatgatcgcactcaggggggtagaaagactaaagcccaaaagggcgggtatgcctacgggaaacctaaatttggctataagactgaagaaaaggaactaaaagaagattcagcacaacaggaaactattaaactaattaagagacaccgtaggtcagggaaaagctaccagaaaatagctgattatctcaatgcccaaagtattcccactaaacaaggtaagaaatggagttctagcgtcgtctatcgaatctgtcaggaaaaagctggttaagtctgtttatagatatttagaatttattgaataaaaatagtatgaacaataaatatttatggactaaccacgctcggaaacgtttaactgaacgatgggaaataaaagaatcatgggttattgataccatcgaaaatcctgaacgttcagaatttattgttgatgagtcaggggaaaaatatcattactataaaagaatagctaagtttaagaatagagtgttagaagtgataacttctgccaactcaacacccacaagaataataaccttttactttaaccgtaacatgaggaaaaatttatgattgttacttacgataatgaagttgacgcaatttattttaagttaacggaaaataaaattgatagcaccgaacctcaaacagacaggattatcattgattacgatgaaagtaataatattgttggcattgaggtattagattttaattatcttgtcaagaaaggtttaaccgttgctgatttacctttttctgaagatgaaagattaacagcttctcaatattttaattttcctgttgctatctaatccagaaggggcaataatccccttctttcatcgagttagacttaatatcacaaaagtcattttcattttaccgtttcttttccacagcgtccgtacgcccctcgttaaatctcaaaaccgacaatttatgatgtttataaaaagttactcactttaataagtatttatactcattaaagggttattctttttttgtagcctgataggttgggaaggaatatttcagattatcagatttgttgaatatttttcgtcagatacgcaaaccttacaaacataattaacaactgaaactattgatatgtctaggttttagctctatcacaggttggatctg

SEQ ID NO: 66 - DNA, 12711 bp, Cyanobacterium sp. ABICyano1
tcgacatacatggttggttcactgacttttaccccagttttctctttgaacaattggcataactctgaaaaaatcagatcgggcttttgttgaattatttgttcaatcaaagcaaaaccgtgattgtctattttcttttttttcccaccactcatagataaaaatttatcccgaactcaggttatattaagttcggatgatcacttaagataattgatcagattggttaagatagagaaaaattctttttcatagtgatttcataattgatagttacaataacgattattatttagtaaaaagattttcaaatcatgaattcttataccgtgggtacttatttagccgaacgcttagtgcaaattggtttaaaacatcattttgccgtggctggggactataatttagtgttattggataacttattattaaataaaaacatggaacaagtgtattgttgtaatgaattaaattgtggtttttctgctgaaggttatgctagagctaaaggtgcagctgctgctgttgttacttattctgtgggtgctttatctgcttttgatgctattggtggtgcttatgccgaaaatttacccgtgattttaatttctggtgcccctaataataatgatcatgccgctggacatgttttacatcatgccttaggtaaaaccgattatcattatcaattagaaatggccaaaaatattactgctgctgccgaagctatttatactcctgaagaagcccctgccaaaattgatcatgtgattaaaaccgccttacgcgaaaaaaaacccgtgtatttagaaattgcctgtaatattgcttctatgccttgtgctgctcctgggcctgcttctgctttatttaatgatgaagcctctgatgaagctagtttaaatgctgccgtggaagaaaccttaaaatttattgccaatcgcgataaagttgccgtgttagttggttctaaattaagagctgctggtgctgaagaagctgctgttaaatttgctgatgctttaggtggtgcagttgctactatggctgctgccaaatctttttttcccgaagaaaatccccattatattggaactagttggggagaagtttcttatcctggtgtggaaaaaactatgaaagaagccgacgctgttattgctttagcccctgtgtttaatgattattctaccactggttggactgatattcccgatcccaaaaaattagttttagccgaacctcgttctgttgttgttaatggtgttcgctttccctctgtgcatttaaaagattatttaacccgcttagcccaaaaagtttctaaaaaaactggtgccttagatttttttaaatctttaaatgcgggtgaattaaaaaaagctgctcctgctgatccttctgctcctttagttaatgctgaaattgcccgtcaagttgaagccttattaacccctaatactaccgttattgccgaaactggtgattcttggtttaatgcccaacgcatgaaattacctaatggtgcccgtgttgaatatgaaatgcaatggggtcatattggttggtctgtacctgctgcttttggttatgctgttggtgctcctgaacgtcgtaatattttaatggtgggtgatggttcttttcaattaactgcccaagaagttgcccaaatggttcgcttaaaattacccgttattatttttttaataaataattatggttataccattgaagtgatgattcatgatgggccatataataatattaaaaattgggattatgcgggtttaatggaagtgtttaatggtaatggtggttatgattctggtgctggtaaaggtttaaaagccaaaactggtggtgaattagctgaagctattaaagttgccttagccaatactgatgggccaaccttaattgaatgttttattggtcgcgaagattgtaccgaagaattagttaaatggggtaaacgtgttgctgctgctaattctcgcaaacccgtgaataaattattgtaatttttggggatcaattcgagctcagcaagtttcatcccgaccccctcagggtcgggatttttttattgtactagttgacataagtaaaggcatcccctgcgtgatataattaccttcagtttaaggaggtatacacatatgagtgaaactaaatttaaagcctatgccgtaatgaatcctggtgaaaaattacaaccctgggaatatgaacctgctcctttacaggtagatgaaattgaagtaagagttactcacaatggtttatgtcacactgacttacacatgagagataatgactggaatgttagtgagttccccttagtagcaggtcatgaagttgttggtgaagtaaccgctgttggtgaaaaagtaaccagtcgtaaaaaaggtgatagagttggtgtaggttggattcgtaattcttgtcgcgcttgtgaccattgtttacaaggagaagagaacatttgtagagagggttatactggtttaattgttggtcatcacggtggatttgctgatcgtgtacgtgtacctgctgacttcacttataaaattcctgatgctttagatagtgcatctgctgctcctttattatgtgccggtattaccgtttacactcctttaagaacctacattaaacatcccggtatgaaagtaggtgttatgggtattggaggattaggacatttagctattaaatttgctcgtgcaatgggagcagaagttactgcctttagtaccagtcctaataaagaagcccaagccaaagaatttggtgctcatcatttccaacaatggggtactgctgaagaaatgaaagctgttgccggtaattttgatttagttttatctaccatctctgctgaaactgactgggatgctgccttctctttattagcaaataacggtgttttatgtttcgtaggtattcccgttagttctttaaatgttcctttaattcctttaattttcggacaaaaatctgttgtaggttctgtagttggaggaagaagattcatggcagaaatgttagagttcgccgctgtaaatcagattaaacctatgatcgaaactatgcccttatctcaagtaaatgaagctatggataaagttgccgccaataaagccagatatagaattgtattattatctgaataactagatctcctgcagagaatataaaaagccagattattaatccggcttttttattatttaaatactgtgcacgatcctgcaggatcatcttgctgaaaaactcgagcgctcgttccgcaaagcggtacggagttagttaggggctaatgggcattctcccgtacaggaaagagttagaagttattaattatcaacaattctcctttgcctagtgcatcgttacctttttaattaaaacataaggaaaactaataatcgtaataatttaacctcaaagtgtaaagaaatgtgaaattctgacttttataacgttaaagagggaaaaattagcagtttaaaatacctagagaatagtctggggtaagcatagagaattagattagttaagttaatcaaattcagaaaaaataataatcgtaaatagttaatctgggtgtatagaaaatgatccccttcatgataagatttaaactcgaaaagcaaaagccaaaaaactaacttccattaaaagaagttgttacatataacgctataaagaaaatttatatatttggaggataccaaccatgtctcatattcaacgtgaaactagttgttctcgccctcgtttaaattctaatatggatgccgatttatatggttataaatgggctcgtgataatgttggtcaatctggtgctactatttatcgtttatatggtaaacctgatgctcctgaattattcttgaaacatggtaaaggttctgttgctaatgatgttactgatgaaatggttcgtttaaactggttgactgaatttatgcctttacctactattaaacattttattcgtactcccgatgatgcttggttattaactactgctattcctggtaaaactgcttttcaagttttagaagaatatcctgattctggtgaaaatattgttgatgctttagctgtttttttacgtcgtttacattctattcccgtttgtaattgtccttttaattctgatcgtgtttttcgtttagctcaagctcaatctcgtatgaataatggtttagttgatgcttctgattttgatgatgaacgtaatggttggcctgttgaacaagtttggaaagaaatgcacaaattgttacctttttctcctgattctgttgttactcatggtgatttttctttagataatttgatctttgatgaaggtaaattgattggttgtattgatgttggtcgtgttggtattgctgatcgttatcaagatttagctattttatggaattgtttaggtgaattttctccttctttacagaaacgtttatttcagaaatatggtattgataatcctgatatgaacaagttacaatttcatttaatgttggacgagttcttttaagaattaattcatgaccaaaatcccttaacgtgagttttcgttccactgagcgtcagaccccgtagaaaagatcaaaggatcttcttgagatcctttttttctgcgcgtaatctgctgctatttaaattacgtacacgtgttattactttgttaacgacaattgtcttaattaactgggcctcatgggccttccgctcactgcccgctttccagtcgggaaacctgtcgtgccagctctgcagatgacggtgaaaacctctgacacatgcagctcccggagacggtcacagcttgtctgtaagcggatgccgggagcagacaagcccgtcagggcgcgtcagcgggtgttggcgggtgtcggggcgcagccatgacccagtcacgtagcgatagcggagtgtatactggcttaactatgcggcatcagagcagattgtactgagagtgcaccatatgcggtgtgaaataccgcacagatgcgtaaggagaaaataccgcatcaggcgctcttccgcttcctcgctcactgactcgctgcgctcggtcgttcggctgcggcgagcggtatcagctcactcaaaggcggtaatacggttatccacagaatcaggggataacgcaggaaagaacatgtgagcaaaaggccagcaaaaggccaggaaccgtaaaaaggccgcgttgctggcgtttttccataggctccgcccccctgacgagcatcacaaaaatcgacgctcaagtcagaggtggcgaaacccgacaggactataaagataccaggcgtttccccctggaagctccctcgtgcgctctcctgttccgaccctgccgcttaccggatacctgtccgcctttctcccttcgggaagcgtggcgctttctcatagctcacgctgtaggtatctcagttcggtgtaggtcgttcgctccaagctgggctgtgtgcacgaaccccccgttcagcccgaccgctgcgccttatccggtaactatcgtcttgagtccaacccggtaagacacgacttatcgccactggcagcagccactggtaacaggattagcagagcgaggtatgtaggcggtgctacagagttcttgaagtggtggcctaactacggctacactagaaggacagtatttggtatctgcgctctgctgaagccagttaccttcggaaaaagagttggtagctcttgatccggcaaacaaaccaccgctggtagcggtggtttttttgtttgcaagcagcagattacgcgcagaaaaaaaggatctcaagaagatcctttgatcttttctactgcagaagcttgttagacaccctgtcatgtattttatattatttatttcaccatacggattaagtgaaacctaatgaaaatagtactttcggagctttaactttaatgaaggtatgtttttttatagacatcgatgtctggtttaacaataggaaaaagtagctaaaactcccatgaattaaagaaataacaaggtgtctaacaacctgttattaagaatgttagaaaagacttaacatttgtgttgagtttttatagacattggtgtctagacatacggtagataaggtttgctcaaaaataaaataaaaaaagattggactaaaaaacatttaatttagtacaatttaattagttattttttcgtctcaaattttgctttgttgagcagaaatttagataaaaaaatccccgtgatcagattacaatgtcgttcattgtacgatgtgtcgaaaaatctttacgacactctaaactgaccacacgggggaaaaagaaaactgaactaataacatcatgatactcggaaaacctagcaattctcaacccctaaacaaaagaaacttccaaaaccctgaccatataaaggagtggcaacaatcagcaatcagtcaagatttgatagcagaaaatcttgtatcggttgctaatggttttgatgtactatttatcggcaataaataccgaactaacacgggtgttctgtcacggcacatattaaactcctattctcatttagaagatggtggttcgtatggtagaacatttgacccatttaccaataaagaaatgcagtgggttcaatttaaaccgaatagaccaagaaaaggttctactggtaaggtaatcaaatatgaatcgccaaaaggtgaacctacaagagttctaatgccgtttgtgcctatgaaaatatggcaacggattagcgataagttcggagtaccgattaatccgaaaaaagatactcacttttgggaatgggtaaagaataatccatcgataccgattgccattacagaaggaaataaaaaagctaattgcctattatcctatggctatcctgctattgcctttgtaggcatttggaacggattagagaaaataaatgatttctcgaaggaaaagcagttaaaagaggatttgaaatggttgttatccaacggcaaccgaaatattaatatcatctttgaccaagaccagaaacaaaaaactgtaattaatgtaaacaaagctattttcgctttatcttctctaataagtagaaatggtcataaagttaatattgtgcaatggttgccgtcaaaaggtaaaggaatagatgattatttggtagctttaccttttgagaaaagagaaaatcatttagacaacttaattaaaattgcaccatcatttaatttttggtcaactaaatacttattcaagtgtcgtaaaccagatttaaccgtaaattgccgttatttgagcgatgcagtaaaagaattacctcaagaggatatagcattaatagcacctcacggcacgggtaaaacttcattagtagctactcacgttaagaatcggagttatcacggaaggaaaactatttcattggtgcatcttgaaagtttagccaaagctaatggcaacgcacttggattatattaccgaaccgaaaataatattgaaaagcaatatcttggatttagcttatgtgtagatagttgccgtgataagattaacggcattacaactgatattatttcaggtcaagattattgccttttcattgatgaaattgaccaagtaattccacacatccttaacagtgaaactgaagtaagtaagtatagatgcaccatcattgacactttttctgaactggtgagaaatgctgaacaggtcattattgctgatgctgatttatccgatgtgacgattgacctaatagaaaacatcagaggtaaaaaactatatgtaatcaagaatgaatatcagtatcagggaatgacttttaacgccgttggttcaccattagaaatgatggcaatgatgggaaaatcggtgtcagaaggcaagaaattatttattaacaccacatcccaaaaggcaaaaagtaagtacggcacaatcgctcttgagtcttatatttttggtctaaataaagaagcaaagatattaagaatagactctgaaaccactaaaaaccctgaacatccagcctataaaatcattgaccaagacttaaataatatcctcaaagattatgattatgtcattgcctcaccttgccttcaaacaggtgtcagtattaccttaaaagggcattttgaccagcaatttaacttttccagtggaaacattacacctcattgctttttacagcaaatgtggcggttgagggatgcagaaattgaaagattctattatgtgccgaactcatctaacctcaatctcattgggaataagtcaagttcaccatcagaccttctaaagagcaataacaagatggcaacggcaacggttaaccttttgggtagaatcgactccgaatattccctagagtatgaatcgcacggcatttggcttgagacgtgggcaaaattatcagcacggcataacagttcaatgcgttgttactctgaaattcttacctatctaattacgtctcaagggcataaattaaatatcaacattccctcacctcttgcagatattaagaagctaaatgatgaggtaagtagtaacagggaaaaggtaaaaaatgagagatactctcagaggttaaactcaccagatattaacgatgcagaagctaccatactcgaatctaaagagcaaaaaatcggattgactctcaatgagagatgcaccctagaaaagcataaagttaagaagcggtatgggaatgtaaagatggatattctcacctttgatgatgatggactataccccaaactcagactattttattacctcaccatcggtaaacctcatctcaaggctaatgacagaaaagctattgccaaaatgggcaatgacaataaaggcaagattctatcaaaagacttagttaataaaacttactccgctcgtgtgaaggtcttagagattcttaaactaactgactttatcgacaatcttagagatgaactcttaataactcccaataatccagctatcaccgattttaataatcttctgctaagagctaagaaggatttaagagtattaggagtcaacatcggaaaatatccaatggccaacattaatgccgtacttactctcattggtcacaaactttctgtaatgagagatgagttcggaaaagagaaaaggataaaagtagatggtaaatcataccgatgttatcaacttgaaacattaccagattttaccaatgatactcttgactactggttagaaaatgatagccaaaaagaagtaacagcaacagaaaattactccgaaaattttaacccttcaaatagctacaatccagacagtaagacactttcagagggtgcaaatttcctatatataaataaagaagaattgcatccaaataaattgcacctagaaataaaagaaggtgctgaactttttttattcggggtaaaggtgattgtgaaaggaatcttggacggggcagtaactatattctctatgggtcaagaatacgatttatccctcaatgaactagaggggatgttaacatcatgaactttacaagaatctttttaaagggcgatcgcaccatgttaaatgatggtacatttgttcagatatttgatatttaccatgaccacgcattgggagtgacccttgaccttaagacagaaaaaattatttccgatgatgttagggtaattactgtcaaagacttattgttcgatggcacttataaaggggtaaaatcttttatgcccgataatgcccgataatgcccgattgatgctacaaaatcccataatcataagcgataatcccctaatagcttgtaattcttgaaccgtagcgattttagagtattccaaaaagaagaaataaacaccgcaaaatgtcgtatttcacatatataaaccaaggttttttgccctaaaatctttatgtttgtagtgtgatgttgggtcaaaatggtcagaaaagttgcaaggtttttatggatgcttacgcgcgcgaggggtaagcatccccaaatagttactttatcctagtccatgcccatttattgccgtcccgttcggctttaaaaaagtgccaaaactcacaaggtgcaataaaaagttctgtacctttcgcaaccctagataatctttcaacagttactttttttcctattatctcggtacaaagtttggctagtttctcttttccctctttttcaatcaagccttcttgtatgcccaactcattgattaatctctctatttttaccattatttcccgttcaggtagtttatcccctaaatcttcatcggggggcaatgtagggcattctgaaggggctttttcttctgtctggacattatctaatattgaagtaaccaaactatcttcagttttttctattcctattaattcatattcggttactgtatccgtatcaatatccgaataactatctttatccgtattagctattcggttaagtttatccgttaactcagaaacaagactatatagcggttttagcttttcttctatcctgttatctaatacggataagtttatacggttatcattatccgtattagtatcattgggcttttttggtagttctaccccctcataaaccgcttttattcccaattccaacagactgataacagtatcctttataatgggttttttgctgatatggtgaacttttgccccttccatcattgcgatactttctatctcactcatcaacttatcgcttaagtgaatctcgtatctgtttaatcccttactggttttattcatatccgtttactttattcggttaacaattctattttatacgaataaaatattatacggttaactttatacgtttaactattttatctatacggataacagtaataagttattcgtattagttatacgtttacttttatccaaataaaattagtgcatttaaactaaaagaatgattttatcggagttgatagcattggattaacctaaagatgtttataagctatatctgataagtatttaaggttattttgttattctgtttattgacattatcagaataaaagaatagaatataattgttgagagataagaggtttaagtgattatggttaagaagttagttggttatgtcagggtcagtagtgaatcgcaagaggataacactagcttacagaatcagatagagagaattgaagcatattgtatggcttttggttatgagttggtaaaaatattcaaagaggttgccactggtacaaaagcagatattgaaacccgtcctatttttaatgaagctatagaatacttgaaacaggataatgctaatggaattattgccttgaagctagaccgaatcgcacggaatgctttagatgtattgcgtttggttcgtgaaaccttagaaccacaaaataaaatgttagtgttactagatattcaggtagatacttcgacaccttcaggaaaaatgattttaactgtaatgagtgccgttgctgaactcgaaagagacatgatctatgatcgcactcaggggggtagaaagactaaagcccaaaagggcgggtatgcctacgggaaacctaaatttggctataagactgaagaaaaggaactaaaagaagattcagcacaacaggaaactattaaactaattaagagacaccgtaggtcagggaaaagctaccagaaaatagctgattatctcaatgcccaaagtattcccactaaacaaggtaagaaatggagttctagcgtcgtctatcgaatctgtcaggaaaaagctggttaagtctgtttatagatatttagaatttattgaataaaaatagtatgaacaataaatatttatggactaaccacgctcggaaacgtttaactgaacgatgggaaataaaagaatcatgggttattgataccatcgaaaatcctgaacgttcagaatttattgttgatgagtcaggggaaaaatatcattactataaaagaatagctaagtttaagaatagagtgttagaagtgataacttctgccaactcaacacccacaagaataataaccttttactttaaccgtaacatgaggaaaaatttatgattgttacttacgataatgaagttgacgcaatttattttaagttaacggaaaataaaattgatagcaccgaacctcaaacagacaggattatcattgattacgatgaaagtaataatattgttggcattgaggtattagattttaattatcttgtcaagaaaggtttaaccgttgctgatttacctttttctgaagatgaaagattaacagcttctcaatattttaattttcctgttgctatctaatccagaaggggcaataatccccttctttcatcgagttagacttaatatcacaaaagtcattttcattttaccgtttcttttccacagcgtccgtacgcccctcgttaaatctcaaaaccgacaatttatgatgtttataaaaagttactcactttaataagtatttatactcattaaagggttattctttttttgtagcctgataggttgggaaggaatatttcagattatcagatttgttgaatatttttcgtcagatacgcaaaccttacaaacataattaacaactgaaactattgatatgtctaggttttagctctatcacaggttggatctg

SEQ ID NO: 67 - DNA, 13354 bp, Cyanobacterium sp. ABICyano1
aatatttttcgtcagatacgcaaaccttacaaacataattaacaactgaaactattgatatgtctaggttttagctctatcacaggttggatctgtcgacgatcctttttaacccatcacatatacctgccgttcactattatttagtgaaatgagatattatgatattttctgaattgtgattaaaaaggcaactttatgcccatgcaacagaaactataaaaaatacagagaatgaaaagaaacagatagattttttagttctttaggcccgtagtctgcaaatccttttatgattttctatcaaacaaaagaggaaaatagaccagttgcaatccaaacgagagtctaatagaatgaggtcgaaaagtaaatcgcgcgggtttgttactgataaagcaggcaagacctaaaatgtgtaaagggcaaagtgtatactttggcgtcaccccttacatattttaggtctttttttattgtgcgtaactaacttgccatcttcaaacaggagggctggaagaagcagaccgctaacacagtacataaaaaaggagacatgaacgatgaacatcaaaaagtttgcaaaacaagcaacagtattaacctttactaccgcactgctggcaggaggcgcaactcaagcgtttgcgaaagaaacgaaccaaaagccatataaggaaacatacggcatttcccatattacacgccatgatatgctgcaaatccctgaacagcaaaaaaatgaaaaatatcaagttcctgaattcgattcgtccacaattaaaaatatctcttctgcaaaaggcctggaggtttgggacagctggccattacaaaacgctgacggcactgtcgcaaactatcacggctaccacatcgtctttgcattagccggagatcctaaaaatgcggatgacacatcgatttacatgttctatcaaaaagtcggcgaaacttctattgacagctggaaaaacgctggccgcgtctttaaagacagcgacaaattcgatgcaaatgattctatcctaaaagaccaaacacaagaatggtcaggttcagccacatttacatctgacggaaaaatccgtttattctacactgatttctccggtaaacattacggcaaacaaacactgacaactgcacaagttaacgtatcagcatcagacagctctttgaacatcaacggtgtagaggattataaatcaatctttgacggtgacggaaaaacgtatcaaaatgtacagcagttcatcgatgaaggcaactacagctcaggcgacaaccatacgctgagagatcctcactacgtagaagataaaggccacaaatacttagtatttgaagcaaacactggaactgaagatggctaccaaggcgaagaatctttatttaacaaagcatactatggcaaaagcacatcattcttccgtcaagaaagtcaaaaacttctgcaaagcgataaaaaacgcacggctgagttagcaaacggcgctctcggtatgattgagctaaacgatgattacacactgaaaaaagtgatgaaaccgctgattgcatctaacacagtaacagatgaaattgaacgcgcgaacgtctttaaaatgaacggcaaatggtacctgttcactgactcccgcggatcaaaaatgacgattgacggcattacgtctaacgatatttacatgcttggttatgtttctaattctttaactggcccatacaagccgctgaacaaaactggccttgtgttaaaaatggatcttgatcctaacgatgtaacctttacttactcacacttcgctgtacctcaagcgaaaggaaacaatgtcgtgattacaagctatatgacaaacagaggattctacgcagacaaacaatcaacgtttgcgccaagcttcctgctgaacatcaaaggcaagaaaacatctgttgtcaaagacagcatccttgaacaaggacaattaacagttaacaaataaaaacgcaaaagaaaatgccgatatcctattggcattttcttttatttcttatcaacataaaggtgaatcccatatgaactatggatcggcgcagcatgctcccggccgccatcactagtgctcgatgacgctggttaatgccttaactgcttgttctacttcatcttcataaaaatctgcaactttcatcatcattgcatctaattcccccgtttcttcaccaatcatcatcatttgaattgccatagagggaaaaacctttctttccgagatcgcaacacttaacatacctccttctaaaatagaatcttttgcggcgccaatggcattagaaattactttattagggatagtctcttgagatatttctaaacattgtaagataggcacaccagaacgggttaaagtaccaaaaatacgacaaaaacgagcaacagcacttttttcatttaagtccccaaaaatgggagctttaagtgcgatcgtatctatttgtaaacgtccagcaggagttttataatattgacggaaggcaaaaacaaccccaataatcacacccacgggaataattgctttccagctacgcaaaaaatcactaagagtaaccataaattgagtcaaagccggcaattctgcacccaattggtcgaaaataccagcaaatacaggaatcaagaaaatggtcatacccaaaaaagcaatgaccgcaaaaataccaacagtgacaggataagccattgctgatttaatttggttttgcaaacgagcaacatcttcgagaagtttagcaagacgattcatgacttcgtctaaaaccccccctgtttctcccgcttctaccatactcacatatagcctatcaaaacagtcgggatgctttgccattgcttcagataaattaaccccctgttgaacatcctctccaatagtagttagagccttcttaaatttaggatttcctgattgctctgccaatactgacaaagagcggccgcatttaaatagcagcagattacgcgcagaaaaaaaggatctcaagaagatcctttgatcttttctacggggtctgacgctcagtggaacgaaaactcacgttaagggattttggtcatgaattaattcttaaaagaactcgtccaacattaaatgaaattgtaacttgttcatatcaggattatcaataccatatttctgaaataaacgtttctgtaaagaaggagaaaattcacctaaacaattccataaaatagctaaatcttgataacgatcagcaataccaacacgaccaacatcaatacaaccaatcaatttaccttcatcaaagatcaaattatctaaagaaaaatcaccatgagtaacaacagaatcaggagaaaaaggtaacaatttgtgcatttctttccaaacttgttcaacaggccaaccattacgttcatcatcaaaatcagaagcatcaactaaaccattattcatacgagattgagcttgagctaaacgaaaaacacgatcagaattaaaaggacaattacaaacgggaatagaatgtaaacgacgtaaaaaaacagctaaagcatcaacaatattttcaccagaatcaggatattcttctaaaacttgaaaagcagttttaccaggaatagcagtagttaataaccaagcatcatcgggagtacgaataaaatgtttaatagtaggtaaaggcataaattcagtcaaccagtttaaacgaaccatttcatcagtaacatcattagcaacagaacctttaccatgtttcaagaataattcaggagcatcaggtttaccatataaacgataaatagtagcaccagattgaccaacattatcacgagcccatttataaccatataaatcggcatccatattagaatttaaacgaggacgagaacaactagtttcacgttgaatatgagacatggttggtatcctccaaatatataaattttctttatagcgttatatgtaacaacttcttttaatggaagttagttttttggcttttgcttttcgagtttaaatcttatcatgaaggggatcattttctatacacccagattaactatttacgattattattttttctgaatttgattaacttaactaatctaattctctatgcttaccccagactattctctaggtattttaaactgctaatttttccctctttaacgttataaaagtcagaatttcacatttctttacactttgaggttaaattattacgattattagttttccttatgttttaattaaaaaggtaacgatgcactaggcaaaggagaattgttgataattaataacttctaactctttcctgtacgggagaatgcccattagcccctaactaactccgtaccgctttgcggaacgagcgctcgagcgttctctccgaactaatttctccctctcccctcatctataataagatagttaataattacatcgacaattgtctacgtaggcgcgccatgcggccttgacggccttccgccaattcgccctatagtgagtcgtattacgtcgcgctcactggccgtcgttttacaacgtcgtgactgggaaaaccctggcgttacccaacttaatcgccttgcagcacatccccctttcgccagctgcgccggatccctgcaggtcgacgatcgcaggtgtcacaatcatgatttcttgagccattgccctaccaaattcgcccggtttgggatttttctttttagccaaagtttgagcaaatactgccaataaagagttagataacattgctctaatttgggcttgttctgccgaaggaaatacatcaataatacgatcaattgttcccgccgcagagctagtatgtaaagtaccaaagacaaggtgtccagtttccgccgccgtaatcgccaaagaaatggtttctaagtcgcgcatctcacccactagaataatatctggatcttcccttaacgccgcttttaaggcattggcaaaacttttagtatcttctcctttttgacgttggtgaaatagactgttaatattgggaaaaacatactcgatcggatcttctactgttaagatgtgttctgcacgagtgcggttaattaagtccaacattgccgctaaagtagtagtttttccagaacctgtctgccctgtcactaaaatcatacccctagggcgttcggacatctccttgacaatatctggtaagcctaattgatcaaaattgggaattttggaagataaagcccttaaacaagcggcataacaacccctttccttataaacatttacacgaaatcgagccaagccttttaccccgtaggaacagtctaactcccattcttgctctaatgttttacgttgagtattattgagcatactaaaaattaatttttggcactcttgagcattaaggggttcatctccaatgcaaaattacgtacacgtgttattactttgttaacgacaattgtcttaattaactggcctcatgggccttccgctcactgcccgctttccagtcgggaaacctgtcgtgccagctctgcagatgacggtgaaaacctctgacacatgcagctcccggagacggtcacagcttgtctgtaagcggatgccgggagcagacaagcccgtcagggcgcgtcagcgggtgttggcgggtgtcggggcgcagccatgacccagtcacgtagcgatagcggagtgtatactggcttaactatgcggcatcagagcagattgtactgagagtgcaccatatgcggtgtgaaataccgcacagatgcgtaaggagaaaataccgcatcaggcgctcttccgcttcctcgctcactgactcgctgcgctcggtcgttcggctgcggcgagcggtatcagctcactcaaaggcggtaatacggttatccacagaatcaggggataacgcaggaaagaacatgtgagcaaaaggccagcaaaaggccaggaaccgtaaaaaggccgcgttgctggcgtttttccataggctccgcccccctgacgagcatcacaaaaatcgacgctcaagtcagaggtggcgaaacccgacaggactataaagataccaggcgtttccccctggaagctccctcgtgcgctctcctgttccgaccctgccgcttaccggatacctgtccgcctttctcccttcgggaagcgtggcgctttctcaatgctcacgctgtaggtatctcagttcggtgtaggtcgttcgctccaagctgggctgtgtgcacgaaccccccgttcagcccgaccgctgcgccttatccggtaactatcgtcttgagtccaacccggtaagacacgacttatcgccactggcagcagccactggtaacaggattagcagagcgaggtatgtaggcggtgctacagagttcttgaagtggtggcctaactacggctacactagaaggacagtatttggtatctgcgctctgctgaagccagttaccttcggaaaaagagttggtagctcttgatccggcaaacaaaccaccgctggtagcggtggtttttttgtttgcaagcagcagattacgcgcagaaaaaaaggatctcaagaagatcctttgatcttttctactgcagaagcttgttagacaccctgtcatgtattttatattatttatttcaccatacggattaagtgaaacctaatgaaaatagtactttcggagctttaactttaatgaaggtatgtttttttatagacatcgatgtctggtttaacaataggaaaaagtagctaaaactcccatgaattaaagaaataacaaggtgtctaacaacctgttattaagaatgttagaaaagacttaacatttgtgttgagtttttatagacattggtgtctagacatacggtagataaggtttgctcaaaaataaaataaaaaaagattggactaaaaaacatttaatttagtacaatttaattagttattttttcgtctcaaattttgctttgttgagcagaaatttagataaaaaaatccccgtgatcagattacaatgtcgttcattgtacgatgtgtcgaaaaatctttacgacactctaaactgaccacacgggggaaaaagaaaactgaactaataacatcatgatactcggaaaacctagcaattctcaacccctaaacaaaagaaacttccaaaaccctgaccatataaaggagtggcaacaatcagcaatcagtcaagatttgatagcagaaaatcttgtatcggttgctaatggttttgatgtactatttatcggcaataaataccgaactaacacgggtgttctgtcacggcacatattaaactcctattctcatttagaagatggtggttcgtatggtagaacatttgacccatttaccaataaagaaatgcagtgggttcaatttaaaccgaatagaccaagaaaaggttctactggtaaggtaatcaaatatgaatcgccaaaaggtgaacctacaagagttctaatgccgtttgtgcctatgaaaatatggcaacggattagcgataagttcggagtaccgattaatccgaaaaaagatactcacttttgggaatgggtaaagaataatccatcgataccgattgccattacagaaggaaataaaaaagctaattgcctattatcctatggctatcctgctattgcctttgtaggcatttggaacggattagagaaaataaatgatttctcgaaggaaaagcagttaaaagaggatttgaaatggttgttatccaacggcaaccgaaatattaatatcatctttgaccaagaccagaaacaaaaaactgtaattaatgtaaacaaagctattttcgctttatcttctctaataagtagaaatggtcataaagttaatattgtgcaatggttgccgtcaaaaggtaaaggaatagatgattatttggtagctttaccttttgagaaaagagaaaatcatttagacaacttaattaaaattgcaccatcatttaatttttggtcaactaaatacttattcaagtgtcgtaaaccagatttaaccgtaaattgccgttatttgagcgatgcagtaaaagaattacctcaagaggatatagcattaatagcacctcacggcacgggtaaaacttcattagtagctactcacgttaagaatcggagttatcacggaaggaaaactatttcattggtgcatcttgaaagtttagccaaagctaatggcaacgcacttggattatattaccgaaccgaaaataatattgaaaagcaatatcttggatttagcttatgtgtagatagttgccgtgataagattaacggcattacaactgatattatttcaggtcaagattattgccttttcattgatgaaattgaccaagtaattccacacatccttaacagtgaaactgaagtaagtaagtatagatgcaccatcattgacactttttctgaactggtgagaaatgctgaacaggtcattattgctgatgctgatttatccgatgtgacgattgacctaatagaaaacatcagaggtaaaaaactatatgtaatcaagaatgaatatcagtatcagggaatgacttttaacgccgttggttcaccattagaaatgatggcaatgatgggaaaatcggtgtcagaaggcaagaaattatttattaacaccacatcccaaaaggcaaaaagtaagtacggcacaatcgctcttgagtcttatatttttggtctaaataaagaagcaaagatattaagaatagactctgaaaccactaaaaaccctgaacatccagcctataaaatcattgaccaagacttaaataatatcctcaaagattatgattatgtcattgcctcaccttgccttcaaacaggtgtcagtattaccttaaaagggcattttgaccagcaatttaacttttccagtggaaacattacacctcattgctttttacagcaaatgtggcggttgagggatgcagaaattgaaagattctattatgtgccgaactcatctaacctcaatctcattgggaataagtcaagttcaccatcagaccttctaaagagcaataacaagatggcaacggcaacggttaaccttttgggtagaatcgactccgaatattccctagagtatgaatcgcacggcatttggcttgagacgtgggcaaaattatcagcacggcataacagttcaatgcgttgttactctgaaattcttacctatctaattacgtctcaagggcataaattaaatatcaacattccctcacctcttgcagatattaagaagctaaatgatgaggtaagtagtaacagggaaaaggtaaaaaatgagagatactctcagaggttaaactcaccagatattaacgatgcagaagctaccatactcgaatctaaagagcaaaaaatcggattgactctcaatgagagatgcaccctagaaaagcataaagttaagaagcggtatgggaatgtaaagatggatattctcacctttgatgatgatggactataccccaaactcagactattttattacctcaccatcggtaaacctcatctcaaggctaatgacagaaaagctattgccaaaatgggcaatgacaataaaggcaagattctatcaaaagacttagttaataaaacttactccgctcgtgtgaaggtcttagagattcttaaactaactgactttatcgacaatcttagagatgaactcttaataactcccaataatccagctatcaccgattttaataatcttctgctaagagctaagaaggatttaagagtattaggagtcaacatcggaaaatatccaatggccaacattaatgccgtacttactctcattggtcacaaactttctgtaatgagagatgagttcggaaaagagaaaaggataaaagtagatggtaaatcataccgatgttatcaacttgaaacattaccagattttaccaatgatactcttgactactggttagaaaatgatagccaaaaagaagtaacagcaacagaaaattactccgaaaattttaacccttcaaatagctacaatccagacagtaagacactttcagagggtgcaaatttcctatatataaataaagaagaattgcatccaaataaattgcacctagaaataaaagaaggtgctgaactttttttattcggggtaaaggtgattgtgaaaggaatcttggacggggcagtaactatattctctatgggtcaagaatacgatttatccctcaatgaactagaggggatgttaacatcatgaactttacaagaatctttttaaagggcgatcgcaccatgttaaatgatggtacatttgttcagatatttgatatttaccatgaccacgcattgggagtgacccttgaccttaagacagaaaaaattatttccgatgatgttagggtaattactgtcaaagacttattgttcgatggcacttataaaggggtaaaatcttttatgcccgataatgcccgataatgcccgattgatgctacaaaatcccataatcataagcgataatcccctaatagcttgtaattcttgaaccgtagcgattttagagtattccaaaaagaagaaataaacaccgcaaaatgtcgtatttcacatatataaaccaaggttttttgccctaaaatctttatgtttgtagtgtgatgttgggtcaaaatggtcagaaaagttgcaaggtttttatggatgcttacgcgcgcgaggggtaagcatccccaaatagttactttatcctagtccatgcccatttattgccgtcccgttcggctttaaaaaagtgccaaaactcacaaggtgcaataaaaagttctgtacctttcgcaaccctagataatctttcaacagttactttttttcctattatctcggtacaaagtttggctagtttctcttttccctctttttcaatcaagccttcttgtatgcccaactcattgattaatctctctatttttaccattatttcccgttcaggtagtttatcccctaaatcttcatcggggggcaatgtagggcattctgaaggggctttttcttctgtctggacattatctaatattgaagtaaccaaactatcttcagttttttctattcctattaattcatattcggttactgtatccgtatcaatatccgaataactatctttatccgtattagctattcggttaagtttatccgttaactcagaaacaagactatatagcggttttagcttttcttctatcctgttatctaatacggataagtttatacggttatcattatccgtattagtatcattgggcttttttggtagttctaccccctcataaaccgcttttattcccaattccaacagactgataacagtatcctttataatgggttttttgctgatatggtgaacttttgccccttccatcattgcgatactttctatctcactcatcaacttatcgcttaagtgaatctcgtatctgtttaatcccttactggttttattcatatccgtttactttattcggttaacaattctattttatacgaataaaatattatacggttaactttatacgtttaactattttatctatacggataacagtaataagttattcgtattagttatacgtttacttttatccaaataaaattagtgcatttaaactaaaagaatgattttatcggagttgatagcattggattaacctaaagatgtttataagctatatctgataagtatttaaggttattttgttattctgtttattgacattatcagaataaaagaatagaatataattgttgagagataagaggtttaagtgattatggttaagaagttagttggttatgtcagggtcagtagtgaatcgcaagaggataacactagcttacagaatcagatagagagaattgaagcatattgtatggcttttggttatgagttggtaaaaatattcaaagaggttgccactggtacaaaagcagatattgaaacccgtcctatttttaatgaagctatagaatacttgaaacaggataatgctaatggaattattgccttgaagctagaccgaatcgcacggaatgctttagatgtattgcgtttggttcgtgaaaccttagaaccacaaaataaaatgttagtgttactagatattcaggtagatacttcgacaccttcaggaaaaatgattttaactgtaatgagtgccgttgctgaactcgaaagagacatgatctatgatcgcactcaggggggtagaaagactaaagcccaaaagggcgggtatgcctacgggaaacctaaatttggctataagactgaagaaaaggaactaaaagaagattcagcacaacaggaaactattaaactaattaagagacaccgtaggtcagggaaaagctaccagaaaatagctgattatctcaatgcccaaagtattcccactaaacaaggtaagaaatggagttctagcgtcgtctatcgaatctgtcaggaaaaagctggttaagtctgtttatagatatttagaatttattgaataaaaatagtatgaacaataaatatttatggactaaccacgctcggaaacgtttaactgaacgatgggaaataaaagaatcatgggttattgataccatcgaaaatcctgaacgttcagaatttattgttgatgagtcaggggaaaaatatcattactataaaagaatagctaagtttaagaatagagtgttagaagtgataacttctgccaactcaacacccacaagaataataaccttttactttaaccgtaacatgaggaaaaatttatgattgttacttacgataatgaagttgacgcaatttattttaagttaacggaaaataaaattgatagcaccgaacctcaaacagacaggattatcattgattacgatgaaagtaataatattgttggcattgaggtattagattttaattatcttgtcaagaaaggtttaaccgttgctgatttacctttttctgaagatgaaagattaacagcttctcaatattttaattttcctgttgctatctaatccagaaggggcaataatccccttctttcatcgagttagacttaatatcacaaaagtcattttcattttaccgtttcttttccacagcgtccgtacgcccctcgttaaatctcaaaaccgacaatttatgatgtttataaaaagttactcactttaataagtatttatactcattaaagggttattctttttttgtagcctgataggttgggaaggaatatttcagattatcagatttgttg

SEQ ID NO: 68 - DNA, 6005 bp, Cyanobacterium sp. ABICyano1
ctagaatgacggtgaaaacctctgacacatgcagctcccggagacggtcacagcttgtctgtaagcggatgccgggagcagacaagcccgtcagggcgcgtcagcgggtgttggcgggtgtcggggcgcagccatgacccagtcacgtagcgatagcggagtgtatactggcttaactatgcggcatcagagcagattgtactgagagtgcaccatatgcggtgtgaaataccgcacagatgcgtaaggagaaaataccgcatcaggcgctcttccgcttcctcgctcactgactcgctgcgctcggtcgttcggctgcggcgagcggtatcagctcactcaaaggcggtaatacggttatccacagaatcaggggataacgcaggaaagaacatgtgagcaaaaggccagcaaaaggccaggaaccgtaaaaaggccgcgttgctggcgtttttccataggctccgcccccctgacgagcatcacaaaaatcgacgctcaagtcagaggtggcgaaacccgacaggactataaagataccaggcgtttccccctggaagctccctcgtgcgctctcctgttccgaccctgccgcttaccggatacctgtccgcctttctcccttcgggaagcgtggcgctttctcatagctcacgctgtaggtatctcagttcggtgtaggtcgttcgctccaagctgggctgtgtgcacgaaccccccgttcagcccgaccgctgcgccttatccggtaactatcgtcttgagtccaacccggtaagacacgacttatcgccactggcagcagccactggtaacaggattagcagagcgaggtatgtaggcggtgctacagagttcttgaagtggtggcctaactacggctacactagaaggacagtatttggtatctgcgctctgctgaagccagttaccttcggaaaaagagttggtagctcttgatccggcaaacaaaccaccgctggtagcggtggtttttttgtttgcaagcagcagattacgcgcagaaaaaaaggatctcaagaagatcctttgatcttttctaatgcatattttaccctcgacaaatccaagaccatgcaacatttagggtagaattatttttatactcgtaatgtgattgatgtttataacccatgatttttcccgatttttctgcattttctaaccttgttcatcagggaaattttattcctgtttatcgagaattggtagcggatttagaaacccctgtttctgcttggtataaagtttgtgcagaccagccctatagtttcttgttagagtcagtagaaggtggggaaaatttaggaagatatagctttttaggttgtgatcctgtttggatactagaagcaaggggaaatcagaccaaacaagttcatcgtgatggtaaaatcgaaactttttcaggaaatccctttaacatcctctctcaatgtttagaaactattaaacctgttaaattaccagagttgccccccggtattggcggactatttggttattggggttatgagttaatttcttggattgaaccacgagtcaacgtttatcctgcctctgcggaaagtttacccgatggtatttggatgcaggtagataatttattgatttttgatcaagtaaaaagaaaaatatgggcgatcgcatatgcagatttaagacaggagcatttaagcctagaagaaatctacaatcaggcttgtgacaaaatttctaaattagttttaaaactacaattacctttaccagtatccgcaaaaccccttgaatttaaccccccgccaaaaactcaaaaaaatcatcgcattcaatacaaaagcaacaccagcaaagaggcattttgtgccaatgtggaaaaagctaaagaatacattaaagcaggagatatttttcaagtagtcatttctcagaaattacaatctcattatcaaggtcatccttttgagttgtatcgctccttacgtttgattaacccttccccttatatggcttactataactttcatggatggcagttaatcggctcttctcccgaagtaatggttaaagcagaaaaaactaatgatggtaaaaccaaagccgtagtccgtcccattgcaggaacacgtccaaggggcagaaactatcaagaagaccaatttttagcccaagacttactcaatgatcccaaagaaagggcagaacacgtcatgttagtagatttgggcagaaatgacttaggcagggtctgtgtaaaaggaagcgtggaagtcgatgaattgatggttattgaacgttattcccacgtaatgcacatagtcagtaacgttgtgggagagttagcaggggattactgtgcatgggatttactaaaggcggctttccccgcaggtacggtaagtggagctcctaaaattcgagcaatggaaattattaatgaacttgaacccgaaaggaggggaccttattctggggtttatggttactatgattttgaaggacagttaaatactgctatcacaattagaacgatggttgtggaaaccctttctgggacggaaaatcacttggtatccgttcaagctggagcaggcttagtcgctgactcagatccagacaaggagtatcaagaaactttgaataaagctagaggtttgctagaggcgattagtagcttaagctaagtgaaaattcgtaataaaaaagagcaaatttttgtgactttaaacctgacacctgaaatttatttttgaactccgaacccaaataatgattcaggttgcttaaactcagagaatcattaataattgattcttgttaactcaattgtcatttttaacatgggtgttgaactccgaagctatgtctatctcgatcgattacaacctcaacacgcttcctatataggtacggttgctctaggatttttacctttacccggtgatgcttctttatggattgaaatatcccccggaattgaaataaatcgaattactgatgtggctttgaagtctgctggtcgacttctgcagcgagcgctcgttccgcaaagcggtacggagttagttaggggctaatgggcattctcccgtacaggaaagagttagaagttattaattatcaacaattctcctttgcctagtgcatcgttacctttttaattaaaacataaggaaaactaataatcgtaataatttaacctcaaagtgtaaagaaatgtgaaattctgacttttataacgttaaagagggaaaaattagcagtttaaaatacctagagaatagtctggggtaagcatagagaattagattagttaagttaatcaaattcagaaaaaataataatcgtaaatagttaatctgggtgtatagaaaatgatccccttcatgataagatttaaactcgaaaagcaaaagccaaaaaactaacttccattaaaagaagttgttacatataacgctataaagaaaatttatatatttggaggataccaaccatggtaagatcaagtaacgacgtaacccagcaaggtagtagacctaaaacaaagttgggaggctcaagtatgggtatcattcgcacttgtaggttagggcccgatcaagtgaaatctatgcgagctgctttagatctttttggtagagaatttggtgatgttgcaacttatagtcaacatcaaccagattccgactatttgggaaatcttttacgttctaaaacattcattgcattagcagcatttgatcaggaagctgttgtcggtgcattagccgcttatgttttacccaagtttgaacaacctcgttctgagatctatatctacgatttagcggtatctggcgagcatcgtcgccaagggatagcaacagcgttaatcaatttgttaaagcatgaagctaatgctcttggtgcctatgtgatttacgttcaagcggactatggagatgatcctgccgtagccttgtataccaaacttggaattagagaagaagttatgcactttgatattgatccttctactgctacttaacaattcgttcaagccgagatttaaattacgtacacggcggccgcgaataggaaatctcagttcagagttcggggtgttcactgcactagtcatgaacgggatttttaattcttaattcttaattcttaattatcaattatttaacgtcagttcgggtttgagaatgaaaaaaccctagggataaaggggggtttgcccctagccctttttataaaaaaagaattaaaagctaatcagaaatgaaaaaaataggcagtttaggagagaaaataattgcccagtggttaataaataaaggttattctgttatagaatcaaattggcattgtcgttggggtgaaattgaccttatagtaataaataaaagtttaaaagagattatatttgttgaagttaaaactcgcagtataaaaaattgggatgataatgggctatactctattaataacaaaaaacaagaaaaactctggttaacagctagtttatttttagaaaaaaatcaaatatttactgattggaactgtcgttttgatattgctttattaacttacaaaaaattaactaactttgggacagtattttctgttaacgataattgtttaagaccaaagtttaactatgaaggctatcaatttgaaattgttgattatttggaaaatgctttttaatctgatcttctgcacgtcaaatagtattctacaagacaattcagaatttagaatatattttttggcgttgcttaattatggtatgaaatttactgaaattatgccaaaaattgagacatcaaaatattatcattactgcaagaatgcccatttccccaaccccacctaaatgagaaatcatatacaaaactagtaaagcctatttttttgttacgagattatcccctaactttccattgaggaatcttcaattgtttatcaatgctttttctgctataattgcactcatggtaaggattgaaaacctaaattttaaggtcaattatcttaacttaatcgatagttgtctaagtataactaattgttatagttcatgaagatcaaaatatattgcattttccgcagtattgacagaaacagaagttagtaataaagcaacactatgggtatcagagaaatagttgataattcaagcgatttagaatttagaatcgttagattgatgctaatgccaatagaaatagaattaacttttattaaagaaatagctactattcctttagtctcagctcaaaattagtggactctctactaaattctgtttaggattgccttgttagttaataaattcgctattctcctgattatttttgcgaggagaaaagtcaagtatttacttttttaaaattatgtataaagatataattagtcaccgattaaaactttcattttaagatgatatgagtctaattgtgaacatggaaaagtcgggttttttaaattttacaacttttaggaaactgaaaatataaagtatgaaaaactttatttattcctgaagtcaataggacaaagttcgatgggcaaagggcaaaatgattttgcaagtaccttgacaaaccaaaaattactcgtcttaaaagactgagttttaaacccattgttctttgataaatgataaagaaacgataggataagttaataaaaaatgattttctgggaatcacaagaatttatgaagagatataaaaaaactttcctaagttaagaaaattaagaaaaactaatccatgagactacataaaaacaaggcaaaattttaagattgaactaacattaataattgatttctttaccataattactttgtcttttcataactaattgtgattaaaacagttgaaagtcagactctttttattagctttatatcgttaactaaacattatctgattgtgacaaatttaagcaaaatattttcaaaattatcaacacagaagcgaaaattttgtgaggatatcaat

SEQ ID NO: 69 - DNA, 9189 bp, Cyanobacterium sp. ABICyano1
gcgagcgctcgttccgcaaagcggtacggagttagttaggggctaatgggcattctcccgtacaggaaagagttagaagttattaattatcaacaattctcctttgcctagtgcatcgttacctttttaattaaaacataaggaaaactaataatcgtaataatttaacctcaaagtgtaaagaaatgtgaaattctgacttttataacgttaaagagggaaaaattagcagtttaaaatacctagagaatagtctggggtaagcatagagaattagattagttaagttaatcaaattcagaaaaaataataatcgtaaatagttaatctgggtgtatagaaaatgatccccttcatgataagatttaaactcgaaaagcaaaagccaaaaaactaacttccattaaaagaagttgttacatataacgctataaagaaaatttatatatttggaggataccaaccatggtaagatcaagtaacgacgtaacccagcaaggtagtagacctaaaacaaagttgggaggctcaagtatgggtatcattcgcacttgtaggttagggcccgatcaagtgaaatctatgcgagctgctttagatctttttggtagagaatttggtgatgttgcaacttatagtcaacatcaaccagattccgactatttgggaaatcttttacgttctaaaacattcattgcattagcagcatttgatcaggaagctgttgtcggtgcattagccgcttatgttttacccaagtttgaacaacctcgttctgagatctatatctacgatttagcggtatctggcgagcatcgtcgccaagggatagcaacagcgttaatcaatttgttaaagcatgaagctaatgctcttggtgcctatgtgatttacgttcaagcggactatggagatgatcctgccgtagccttgtataccaaacttggaattagagaagaagttatgcactttgatattgatccttctactgctacttaacaattcgttcaagccgagatttaaattacgtacacggcggccgcgaataggaaatctcagttcagagttcggggtgttcactgcactagtcatgaacgggatttttaattcttaattcttaattcttaattatcaattatttaacgtcagttcgggtttgagaatgaaaaaaccctagggataaaggggggtttgcccctagccctttttataaaaaaagaattaaaagctaatcagaaatgaaaaaaataggcagtttaggagagaaaataattgcccagtggttaataaataaaggttattctgttatagaatcaaattggcattgtcgttggggtgaaattgaccttatagtaataaataaaagtttaaaagagattatatttgttgaagttaaaactcgcagtataaaaaattgggatgataatgggctatactctattaataacaaaaaacaagaaaaactctggttaacagctagtttatttttagaaaaaaatcaaatatttactgattggaactgtcgttttgatattgctttattaacttacaaaaaattaactaactttgggacagtattttctgttaacgataattgtttaagaccaaagtttaactatgaaggctatcaatttgaaattgttgattatttggaaaatgctttttaatctgatcttctgcacgtcaaatagtattctacaagacaattcagaatttagaatatattttttggcgttgcttaattatggtatgaaatttactgaaattatgccaaaaattgagacatcaaaatattatcattactgcaagaatgcccatttccccaaccccacctaaatgagaaatcatatacaaaactagtaaagcctatttttttgttacgagattatcccctaactttccattgaggaatcttcaattgtttatcaatgctttttctgctataattgcactcatggtaaggattgaaaacctaaattttaaggtcaattatcttaacttaatcgatagttgtctaagtataactaattgttatagttcatgaagatcaaaatatattgcattttccgcagtattgacagaaacagaagttagtaataaagcaacactatgggtatcagagaaatagttgataattcaagcgatttagaatttagaatcgttagattgatgctaatgccaatagaaatagaattaacttttattaaagaaatagctactattcctttagtctcagctcaaaattagtggactctctactaaattctgtttaggattgccttgttagttaataaattcgctattctcctgattatttttgcgaggagaaaagtcaagtatttacttttttaaaattatgtataaagatataattagtcaccgattaaaactttcattttaagatgatatgagtctaattgtgaacatggaaaagtcgggttttttaaattttacaacttttaggaaactgaaaatataaagtatgaaaaactttatttattcctgaagtcaataggacaaagttcgatgggcaaagggcaaaatgattttgcaagtaccttgacaaaccaaaaattactcgtcttaaaagactgagttttaaacccattgttctttgataaatgataaagaaacgataggataagttaataaaaaatgattttctgggaatcacaagaatttatgaagagatataaaaaaactttcctaagttaagaaaattaagaaaaactaatccatgagactacataaaaacaaggcaaaattttaagattgaactaacattaataattgatttctttaccataattactttgtcttttcataactaattgtgattaaaacagttgaaagtcagactctttttattagctttatatcgttaactaaacattatctgattgtgacaaatttaagcaaaatattttcaaaattatcaacacagaagcgaaaattttgtgaggatatcaatctagaatgacggtgaaaacctctgacacatgcagctcccggagacggtcacagcttgtctgtaagcggatgccgggagcagacaagcccgtcagggcgcgtcagcgggtgttggcgggtgtcggggcgcagccatgacccagtcacgtagcgatagcggagtgtatactggcttaactatgcggcatcagagcagattgtactgagagtgcaccatatgcggtgtgaaataccgcacagatgcgtaaggagaaaataccgcatcaggcgctcttccgcttcctcgctcactgactcgctgcgctcggtcgttcggctgcggcgagcggtatcagctcactcaaaggcggtaatacggttatccacagaatcaggggataacgcaggaaagaacatgtgagcaaaaggccagcaaaaggccaggaaccgtaaaaaggccgcgttgctggcgtttttccataggctccgcccccctgacgagcatcacaaaaatcgacgctcaagtcagaggtggcgaaacccgacaggactataaagataccaggcgtttccccctggaagctccctcgtgcgctctcctgttccgaccctgccgcttaccggatacctgtccgcctttctcccttcgggaagcgtggcgctttctcatagctcacgctgtaggtatctcagttcggtgtaggtcgttcgctccaagctgggctgtgtgcacgaaccccccgttcagcccgaccgctgcgccttatccggtaactatcgtcttgagtccaacccggtaagacacgacttatcgccactggcagcagccactggtaacaggattagcagagcgaggtatgtaggcggtgctacagagttcttgaagtggtggcctaactacggctacactagaaggacagtatttggtatctgcgctctgctgaagccagttaccttcggaaaaagagttggtagctcttgatccggcaaacaaaccaccgctggtagcggtggtttttttgtttgcaagcagcagattacgcgcagaaaaaaaggatctcaagaagatcctttgatcttttctaatgcatattttaccctcgacaaatccaagaccatgcaacatttagggtagaattatttttatactcgtaatgtgattgatgtttataacccatgatttttcccgatttttctgcattttctaaccttgttcatcagggaaattttattcctgtttatcgagaattggtagcggatttagaaacccctgtttctgcttggtataaagtttgtgcagaccagccctatagtttcttgttagagtcagtagaaggtggggaaaatttaggaagatatagctttttaggttgtgatcctgtttggatactagaagcaaggggaaatcagaccaaacaagttcatcgtgatggtaaaatcgaaactttttcaggaaatccctttaacatcctctctcaatgtttagaaactattaaacctgttaaattaccagagttgccccccggtattggcggactatttggttattggggttatgagttaatttcttggattgaaccacgagtcaacgtttatcctgcctctgcggaaagtttacccgatggtatttggatgcaggtagataatttattgatttttgatcaagtaaaaagaaaaatatgggcgatcgcatatgcagatttaagacaggagcatttaagcctagaagaaatctacaatcaggcttgtgacaaaatttctaaattagttttaaaactacaattacctttaccagtatccgcaaaaccccttgaatttaaccccccgccaaaaactcaaaaaaatcatcgcattcaatacaaaagcaacaccagcaaagaggcattttgtgccaatgtggaaaaagctaaagaatacattaaagcaggagatatttttcaagtagtcatttctcagaaattacaatctcattatcaaggtcatccttttgagttgtatcgctccttacgtttgattaacccttccccttatatggcttactataactttcatggatggcagttaatcggctcttctcccgaagtaatggttaaagcagaaaaaactaatgatggtaaaaccaaagccgtagtccgtcccattgcaggaacacgtccaaggggcagaaactatcaagaagaccaatttttagcccaagacttactcaatgatcccaaagaaagggcagaacacgtcatgttagtagatttgggcagaaatgacttaggcagggtctgtgtaaaaggaagcgtggaagtcgatgaattgatggttattgaacgttattcccacgtaatgcacatagtcagtaacgttgtgggagagttagcaggggattactgtgcatgggatttactaaaggcggctttccccgcaggtacggtaagtggagctcctaaaattcgagcaatggaaattattaatgaacttgaacccgaaaggaggggaccttattctggggtttatggttactatgattttgaaggacagttaaatactgctatcacaattagaacgatggttgtggaaaccctttctgggacggaaaatcacttggtatccgttcaagctggagcaggcttagtcgctgactcagatccagacaaggagtatcaagaaactttgaataaagctagaggtttgctagaggcgattagtagcttaagctaagtgaaaattcgtaataaaaaagagcaaatttttgtgactttaaacctgacacctgaaatttatttttgaactccgaacccaaataatgattcaggttgcttaaactcagagaatcattaataattgattcttgttaactcaattgtcatttttaacatgggtgttgaactccgaagctatgtctatctcgatcgattacaacctcaacacgcttcctatataggtacggttgctctaggatttttacctttacccggtgatgcttctttatggattgaaatatcccccggaattgaaataaatcgaattactgatgtggctttgaagtctgctggtcgacatacatggttggttcactgacttttaccccagttttctctttgaacaattggcataactctgaaaaaatcagatcgggcttttgttgaattatttgttcaatcaaagcaaaaccgtgattgtctattttcttttttttcccaccactcatagataaaaatttatcccgaactcaggttatattaagttcggatgatcacttaagataattgatcagattggttaagatagagaaaaattctttttcatagtgatttcataattgatagttacaataacgattattatttagtaaaaagattttcaaatcatgaattcttataccgtgggtacttatttagccgaacgcttagtgcaaattggtttaaaacatcattttgccgtggctggggactataatttagtgttattggataacttattattaaataaaaacatggaacaagtgtattgttgtaatgaattaaattgtggtttttctgctgaaggttatgctagagctaaaggtgcagctgctgctgttgttacttattctgtgggtgctttatctgcttttgatgctattggtggtgcttatgccgaaaatttacccgtgattttaatttctggtgcccctaataataatgatcatgccgctggacatgttttacatcatgccttaggtaaaaccgattatcattatcaattagaaatggccaaaaatattactgctgctgccgaagctatttatactcctgaagaagcccctgccaaaattgatcatgtgattaaaaccgccttacgcgaaaaaaaacccgtgtatttagaaattgcctgtaatattgcttctatgccttgtgctgctcctgggcctgcttctgctttatttaatgatgaagcctctgatgaagctagtttaaatgctgccgtggaagaaaccttaaaatttattgccaatcgcgataaagttgccgtgttagttggttctaaattaagagctgctggtgctgaagaagctgctgttaaatttgctgatgctttaggtggtgcagttgctactatggctgctgccaaatctttttttcccgaagaaaatccccattatattggaactagttggggagaagtttcttatcctggtgtggaaaaaactatgaaagaagccgacgctgttattgctttagcccctgtgtttaatgattattctaccactggttggactgatattcccgatcccaaaaaattagttttagccgaacctcgttctgttgttgttaatggtgttcgctttccctctgtgcatttaaaagattatttaacccgcttagcccaaaaagtttctaaaaaaactggtgccttagatttttttaaatctttaaatgcgggtgaattaaaaaaagctgctcctgctgatccttctgctcctttagttaatgctgaaattgcccgtcaagttgaagccttattaacccctaatactaccgttattgccgaaactggtgattcttggtttaatgcccaacgcatgaaattacctaatggtgcccgtgttgaatatgaaatgcaatggggtcatattggttggtctgtacctgctgcttttggttatgctgttggtgctcctgaacgtcgtaatattttaatggtgggtgatggttcttttcaattaactgcccaagaagttgcccaaatggttcgcttaaaattacccgttattatttttttaataaataattatggttataccattgaagtgatgattcatgatgggccatataataatattaaaaattgggattatgcgggtttaatggaagtgtttaatggtaatggtggttatgattctggtgctggtaaaggtttaaaagccaaaactggtggtgaattagctgaagctattaaagttgccttagccaatactgatgggccaaccttaattgaatgttttattggtcgcgaagattgtaccgaagaattagttaaatggggtaaacgtgttgctgctgctaattctcgcaaacccgtgaataaattattgtaatttttggggatcaattcgagctcagcaagtttcatcccgaccccctcagggtcgggatttttttattgtactagttgacataagtaaaggcatcccctgcgtgatataattaccttcagtttaaggaggtatacacatatgagtgaaactaaatttaaagcctatgccgtaatgaatcctggtgaaaaattacaaccctgggaatatgaacctgctcctttacaggtagatgaaattgaagtaagagttactcacaatggtttatgtcacactgacttacacatgagagataatgactggaatgttagtgagttccccttagtagcaggtcatgaagttgttggtgaagtaaccgctgttggtgaaaaagtaaccagtcgtaaaaaaggtgatagagttggtgtaggttggattcgtaattcttgtcgcgcttgtgaccattgtttacaaggagaagagaacatttgtagagagggttatactggtttaattgttggtcatcacggtggatttgctgatcgtgtacgtgtacctgctgacttcacttataaaattcctgatgctttagatagtgcatctgctgctcctttattatgtgccggtattaccgtttacactcctttaagaacctacattaaacatcccggtatgaaagtaggtgttatgggtattggaggattaggacatttagctattaaatttgctcgtgcaatgggagcagaagttactgcctttagtaccagtcctaataaagaagcccaagccaaagaatttggtgctcatcatttccaacaatggggtactgctgaagaaatgaaagctgttgccggtaattttgatttagttttatctaccatctctgctgaaactgactgggatgctgccttctctttattagcaaataacggtgttttatgtttcgtaggtattcccgttagttctttaaatgttcctttaattcctttaattttcggacaaaaatctgttgtaggttctgtagttggaggaagaagattcatggcagaaatgttagagttcgccgctgtaaatcagattaaacctatgatcgaaactatgcccttatctcaagtaaatgaagctatggataaagttgccgccaataaagccagatatagaattgtattattatctgaataactagatctcctgca

SEQ ID NO: 70 - DNA, 5870 bp, Cyanobacterium sp. ABICyano1
catggtaagatcaagtaacgacgtaacccagcaaggtagtagacctaaaacaaagttgggaggctcaagtatgggtatcattcgcacttgtaggttagggcccgatcaagtgaaatctatgcgagctgctttagatctttttggtagagaatttggtgatgttgcaacttatagtcaacatcaaccagattccgactatttgggaaatcttttacgttctaaaacattcattgcattagcagcatttgatcaggaagctgttgtcggtgcattagccgcttatgttttacccaagtttgaacaacctcgttctgagatctatatctacgatttagcggtatctggcgagcatcgtcgccaagggatagcaacagcgttaatcaatttgttaaagcatgaagctaatgctcttggtgcctatgtgatttacgttcaagcggactatggagatgatcctgccgtagccttgtataccaaacttggaattagagaagaagttatgcactttgatattgatccttctactgctacttaacaattcgttcaagccgagatttaaattacgtacacggcggccgcgaataggaaatctcagttcagagttcggggtgttcactgcactagtcatgaacgggatttttaattcttaattcttaattcttaattatcaattatttaacgtcagttcgggtttgagaatgaaaaaaccctagggataaaggggggtttgcccctagccctttttataaaaaaagaattaaaagctaatcagaaatgaaaaaaataggcagtttaggagagaaaataattgcccagtggttaataaataaaggttattctgttatagaatcaaattggcattgtcgttggggtgaaattgaccttatagtaataaataaaagtttaaaagagattatatttgttgaagttaaaactcgcagtataaaaaattgggatgataatgggctatactctattaataacaaaaaacaagaaaaactctggttaacagctagtttatttttagaaaaaaatcaaatatttactgattggaactgtcgttttgatattgctttattaacttacaaaaaattaactaactttgggacagtattttctgttaacgataattgtttaagaccaaagtttaactatgaaggctatcaatttgaaattgttgattatttggaaaatgctttttaatctgatcttctgcacgtcaaatagtattctacaagacaattcagaatttagaatatattttttggcgttgcttaattatggtatgaaatttactgaaattatgccaaaaattgagacatcaaaatattatcattactgcaagaatgcccatttccccaaccccacctaaatgagaaatcatatacaaaactagtaaagcctatttttttgttacgagattatcccctaactttccattgaggaatcttcaattgtttatcaatgctttttctgctataattgcactcatggtaaggattgaaaacctaaattttaaggtcaattatcttaacttaatcgatagttgtctaagtataactaattgttatagttcatgaagatcaaaatatattgcattttccgcagtattgacagaaacagaagttagtaataaagcaacactatgggtatcagagaaatagttgataattcaagcgatttagaatttagaatcgttagattgatgctaatgccaatagaaatagaattaacttttattaaagaaatagctactattcctttagtctcagctcaaaattagtggactctctactaaattctgtttaggattgccttgttagttaataaattcgctattctcctgattatttttgcgaggagaaaagtcaagtatttacttttttaaaattatgtataaagatataattagtcaccgattaaaactttcattttaagatgatatgagtctaattgtgaacatggaaaagtcgggttttttaaattttacaacttttaggaaactgaaaatataaagtatgaaaaactttatttattcctgaagtcaataggacaaagttcgatgggcaaagggcaaaatgattttgcaagtaccttgacaaaccaaaaattactcgtcttaaaagactgagttttaaacccattgttctttgataaatgataaagaaacgataggataagttaataaaaaatgattttctgggaatcacaagaatttatgaagagatataaaaaaactttcctaagttaagaaaattaagaaaaactaatccatgagactacataaaaacaaggcaaaattttaagattgaactaacattaataattgatttctttaccataattactttgtcttttcataactaattgtgattaaaacagttgaaagtcagactctttttattagctttatatcgttaactaaacattatctgattgtgacaaatttaagcaaaatattttcaaaattatcaacacagaagcgaaaattttgtgaggatatcaatctagaatgacggtgaaaacctctgacacatgcagctcccggagacggtcacagcttgtctgtaagcggatgccgggagcagacaagcccgtcagggcgcgtcagcgggtgttggcgggtgtcggggcgcagccatgacccagtcacgtagcgatagcggagtgtatactggcttaactatgcggcatcagagcagattgtactgagagtgcaccatatgcggtgtgaaataccgcacagatgcgtaaggagaaaataccgcatcaggcgctcttccgcttcctcgctcactgactcgctgcgctcggtcgttcggctgcggcgagcggtatcagctcactcaaaggcggtaatacggttatccacagaatcaggggataacgcaggaaagaacatgtgagcaaaaggccagcaaaaggccaggaaccgtaaaaaggccgcgttgctggcgtttttccataggctccgcccccctgacgagcatcacaaaaatcgacgctcaagtcagaggtggcgaaacccgacaggactataaagataccaggcgtttccccctggaagctccctcgtgcgctctcctgttccgaccctgccgcttaccggatacctgtccgcctttctcccttcgggaagcgtggcgctttctcatagctcacgctgtaggtatctcagttcggtgtaggtcgttcgctccaagctgggctgtgtgcacgaaccccccgttcagcccgaccgctgcgccttatccggtaactatcgtcttgagtccaacccggtaagacacgacttatcgccactggcagcagccactggtaacaggattagcagagcgaggtatgtaggcggtgctacagagttcttgaagtggtggcctaactacggctacactagaaggacagtatttggtatctgcgctctgctgaagccagttaccttcggaaaaagagttggtagctcttgatccggcaaacaaaccaccgctggtagcggtggtttttttgtttgcaagcagcagattacgcgcagaaaaaaaggatctcaagaagatcctttgatcttttctaatgcatattttaccctcgacaaatccaagaccatgcaacatttagggtagaattatttttatactcgtaatgtgattgatgtttataacccatgatttttcccgatttttctgcattttctaaccttgttcatcagggaaattttattcctgtttatcgagaattggtagcggatttagaaacccctgtttctgcttggtataaagtttgtgcagaccagccctatagtttcttgttagagtcagtagaaggtggggaaaatttaggaagatatagctttttaggttgtgatcctgtttggatactagaagcaaggggaaatcagaccaaacaagttcatcgtgatggtaaaatcgaaactttttcaggaaatccctttaacatcctctctcaatgtttagaaactattaaacctgttaaattaccagagttgccccccggtattggcggactatttggttattggggttatgagttaatttcttggattgaaccacgagtcaacgtttatcctgcctctgcggaaagtttacccgatggtatttggatgcaggtagataatttattgatttttgatcaagtaaaaagaaaaatatgggcgatcgcatatgcagatttaagacaggagcatttaagcctagaagaaatctacaatcaggcttgtgacaaaatttctaaattagttttaaaactacaattacctttaccagtatccgcaaaaccccttgaatttaaccccccgccaaaaactcaaaaaaatcatcgcattcaatacaaaagcaacaccagcaaagaggcattttgtgccaatgtggaaaaagctaaagaatacattaaagcaggagatatttttcaagtagtcatttctcagaaattacaatctcattatcaaggtcatccttttgagttgtatcgctccttacgtttgattaacccttccccttatatggcttactataactttcatggatggcagttaatcggctcttctcccgaagtaatggttaaagcagaaaaaactaatgatggtaaaaccaaagccgtagtccgtcccattgcaggaacacgtccaaggggcagaaactatcaagaagaccaatttttagcccaagacttactcaatgatcccaaagaaagggcagaacacgtcatgttagtagatttgggcagaaatgacttaggcagggtctgtgtaaaaggaagcgtggaagtcgatgaattgatggttattgaacgttattcccacgtaatgcacatagtcagtaacgttgtgggagagttagcaggggattactgtgcatgggatttactaaaggcggctttccccgcaggtacggtaagtggagctcctaaaattcgagcaatggaaattattaatgaacttgaacccgaaaggaggggaccttattctggggtttatggttactatgattttgaaggacagttaaatactgctatcacaattagaacgatggttgtggaaaccctttctgggacggaaaatcacttggtatccgttcaagctggagcaggcttagtcgctgactcagatccagacaaggagtatcaagaaactttgaataaagctagaggtttgctagaggcgattagtagcttaagctaagtgaaaattcgtaataaaaaagagcaaatttttgtgactttaaacctgacacctgaaatttatttttgaactccgaacccaaataatgattcaggttgcttaaactcagagaatcattaataattgattcttgttaactcaattgtcatttttaacatgggtgttgaactccgaagctatgtctatctcgatcgattacaacctcaacacgcttcctatataggtacggttgctctaggatttttacctttacccggtgatgcttctttatggattgaaatatcccccggaattgaaataaatcgaattactgatgtggctttgaagtctgctggtcgacttctgcagtgagaaaaagtgtaaacaaatattaagaaaaagatcagaaaaatttaacaacacgtaataaaaaaatgcgtcactacgggttataaatttacatgaaaggttaaaacacttttctgagacgattttgataaaaaagttgtcaaaaaattaagtttctttacaaatgcttaacaaaaacttggttttaagcacaaaataagagagactaatttgcagaagttttacaaggaaatcttgaagaaaaagatctaagtaaaacgactctgtttaaccaaaatttaacaaatttaacaaaacaaactaaatctattaggagattaactaaaac

SEQ ID NO: 71 - DNA, 6097 bp, Cyanobacterium sp. ABICyano1
ggccgctaatggtagtctgtgtcttgcaacctgttcggatcaggtaagggcatttataaagcagaactaaataaaatctctgctacctgtacggcagtatataaaggaaattaatatgacttacgcagtaattgaaatctgtggaaaacaacttaaagttgaaccaggcagattttacgatatagacagaatcaatcaagaatcagaaatcgaagtatccatcgataaggtacttttagttagtcatgacaatgatattcatgtaggacaaccttacgtggaaggtgcgacagtaagcggtacaatcattgatcatcgtcggggcaaaaaagttttggtctacaaaatgaagcccaaaaagaaaactcgcaaaaaaagaggtcatagacaagaattaacacgcttaatgatcgattctattagtattgatggcaatgtaattgcagaaaaaacctctgaatctaaatctgtagaaacagaagttgcgatcgaggcttaacataaagcacaataaaaataatatttaatttgatttaaccttaaatttttgctcaggagtatataaaatggcacataagaaaggtactggtagtactagaaacggaagagattctaattctaagcgtctaggtgtaaaacgttatagcggagaaacagtaaccgcaggaagtatcttagttcgtcaacgtggtactaaagtttatcccggtaataatgttggtattggtaaagatgatactctttttgctttaattgaaggagttgttaaatttgaaaataaaactaccagtcgtaaaaaagtaagcgtatatcctgcttaaatttatgactaggtcaaaattaattaaagcttagttttaactattaattaacaaggggcttaagccccttatttttttgtctgctcgactgattacttatttaatttcaagttaattgttagctaggaagatgtgataaaaaagacgattgctattattccatgtcctgtaaaatattgtggaatatgtaatcaaaatgaaactaaaatatatgctagaactaatttctatttttagtgccgccgcattggggggagtattagcatccatacttcgacaaccggtcattctaggctatttattggcaggaattaccattggaccttttggattaggtttaattcaagaatatgaacaagtggaagtggtagcagaattgggtgttactttccttttatttgctttaggggtggaattttcctttgaggagttgaagaaagttaaagttattagtctaggaggaggaggtttacaaatcagcttgactattttaactacggtaattctctccacaagtttgggatgggtaaattctattcccgaaggggtattgttaggacaaatgctttctctttcctctacggcagtagtaattaaggtattgatggataataatgaaaaggataccccccaaggtcaggtaatgctgggaattcttataattcaggatttagctttaggtttaatgttagcagttttacctgcgttgaataaaccggcggaggaaattggtattgctatgattatcgctttagtcaaattaattctctttgctttaggggcgattatcgtgggtaaatggttagttcctcctattttaagattattagcaaaaactgagagtaaagaacttttcttgttaggagttgttactatttgcctaggtgttgctttatttactggtaaattgggactttccaccgaaatgggtgcatttgttgcaggtttaatgatttcagagattgaatatgctgatgaaaccctctcagatgttgaaccgttacgggatatttgttctattgcttttttcgcctctatcggagtgctaattaatcctatctttctttgggataacttaccaattattttggggttagtagctttagtcgtattaggaaaagccttattaattacccccattgtccttcttttccgttatcctttaaaaacggctcttgtttctggtttaggattagcacaaatcggatatcaatctagaatgacggtgaaaacctctgacacatgcagctcccggagacggtcacagcttgtctgtaagcggatgccgggagcagacaagcccgtcagggcgcgtcagcgggtgttggcgggtgtcggggcgcagccatgacccagtcacgtagcgatagcggagtgtatactggcttaactatgcggcatcagagcagattgtactgagagtgcaccatatgcggtgtgaaataccgcacagatgcgtaaggagaaaataccgcatcaggcgctcttccgcttcctcgctcactgactcgctgcgctcggtcgttcggctgcggcgagcggtatcagctcactcaaaggcggtaatacggttatccacagaatcaggggataacgcaggaaagaacatgtgagcaaaaggccagcaaaaggccaggaaccgtaaaaaggccgcgttgctggcgtttttccataggctccgcccccctgacgagcatcacaaaaatcgacgctcaagtcagaggtggcgaaacccgacaggactataaagataccaggcgtttccccctggaagctccctcgtgcgctctcctgttccgaccctgccgcttaccggatacctgtccgcctttctcccttcgggaagcgtggcgctttctcatagctcacgctgtaggtatctcagttcggtgtaggtcgttcgctccaagctgggctgtgtgcacgaaccccccgttcagcccgaccgctgcgccttatccggtaactatcgtcttgagtccaacccggtaagacacgacttatcgccactggcagcagccactggtaacaggattagcagagcgaggtatgtaggcggtgctacagagttcttgaagtggtggcctaactacggctacactagaaggacagtatttggtatctgcgctctgctgaagccagttaccttcggaaaaagagttggtagctcttgatccggcaaacaaaccaccgctggtagcggtggtttttttgtttgcaagcagcagattacgcgcagaaaaaaaggatctcaagaagatcctttgatcttttctaatgcatattattgattaacttaggctgaagggcaacaggggattttaaatagtaaaagataaaattttaatcaattacttttgtgataataatttgaagctcttactttttattaaattatcataactactgtaaaagatctgaaaaatcctgcttatgaagctaagaataacttatgaatttacacttcttactaactcttaaaaaagactattaatcttattttatcactgccatattctggacttaaaattgccatctaaaccccttttgtctcttaaaaattgccaaataagagtaaagtattctttagcggcactgacggaatcacccatataacgacacaataacccctgttgtaaagctgttattcctattcctatattttcgtcatatttttcttttatcaaatggcgtaaattggaaatatattgattaatatcttctgaccctatataaactaaattacccaccactggatttccccctaaaccattggaagcgtaaaataaaggactatttcccataaaatattgcctatcaatccaaatcggtttgttttctcgccaaatctctaaataatttaaccaattaccttcactaaaaatttccccccttgcacttctaccgaaacgaattatttcccatcctaaccaactagcattatcttctaaatcaactctcattttttgctcaaaattagcattgttaaaaacaatcatttcttgtggtaaatattctaaataagcatttttttctagcttaatttttacttcttgaatagctttttttcccttagaaccatatatttttgttgccgcaggggtcgttattaaaacctgagaactatttgctaaacaaatattttgcgagagaatatcatctccagctattcctccagcagtatgtaaaataacgctgtgacaaacggatttcccttcaggataaaaagaattttgaaacttaaaaggtgcttgactaaatactgattttattgtcgtttcttgtttttgatgttcatataccagatttattattccttgccagtttttcattaattaatatctatttactaaaaattattaagaattttttatactaacaaaaataccatttattctattctaattattgtatttttcttgctctcttagcttagttgatagcaattatcccttaaaaaattgtttggagttcggggtaatatttttaattatcaactattcacttttgccccttaccctcttaccttttcccataagacaatttacacaactcaaatagaattgttatgtcctccattgtgaaaaaggattattggctagataagagttatagtaacgcaaatcgtcagttacttcctctcctatccattcagggagaataatatcttgattttcctctgtcaattctacttctgccattgtcaaacctttgttttcccctaaaaattcatctacttcccaagttaaattacctacaagtattttatagcgtattttttcaataaaggggcgatcgcacaaagtttgtaacatttcctcagcttcttccacaggaatagaatattcaaattctgatctcgtctgaccttttgttttacccttaagagtgagataaccctgcgcaccaacaatccgaaccctcacagtattaccactgatagtataaatatatccctgccgataaaccaaaccattgtcagggggaaaccacttatccaagttaactaaaaattttctctcaatttcgatacccattttcttgccaagaaaaataaattaatgttatactaacaaagtatcaaaaattagggcggcgtagccaagtggtaaggcagaggtctgcaaaacctttatcccccagttcgaatctgggcgtcgcctcttaagtaagactattttattatagactcttaggttctcacctctaaaccttgaactccaaatgtcgacttctgcagcgagcgctcgttccgcaaagcggtacggagttagttaggggctaatgggcattctcccgtacaggaaagagttagaagttattaattatcaacaattctcctttgcctagtgcatcgttacctttttaattaaaacataaggaaaactaataatcgtaataatttaacctcaaagtgtaaagaaatgtgaaattctgacttttataacgttaaagagggaaaaattagcagtttaaaatacctagagaatagtctggggtaagcatagagaattagattagttaagttaatcaaattcagaaaaaataataatcgtaaatagttaatctgggtgtatagaaaatgatccccttcatgataagatttaaactcgaaaagcaaaagccaaaaaactaacttccattaaaagaagttgttacatataacgctataaagaaaatttatatatttggaggataccaaccatggtaagatcaagtaacgacgtaacccagcaaggtagtagacctaaaacaaagttgggaggctcaagtatgggtatcattcgcacttgtaggttagggcccgatcaagtgaaatctatgcgagctgctttagatctttttggtagagaatttggtgatgttgcaacttatagtcaacatcaaccagattccgactatttgggaaatcttttacgttctaaaacattcattgcattagcagcatttgatcaggaagctgttgtcggtgcattagccgcttatgttttacccaagtttgaacaacctcgttctgagatctatatctacgatttagcggtatctggcgagcatcgtcgccaagggatagcaacagcgttaatcaatttgttaaagcatgaagctaatgctcttggtgcctatgtgatttacgttcaagcggactatggagatgatcctgccgtagccttgtataccaaacttggaattagagaagaagttatgcactttgatattgatccttctactgctacttaacaattcgttcaagccgagatttaaattacgtacacggc

SEQ ID NO: 72 - DNA, 12649 bp, Cyanobacterium sp. ABICyano1
tcgacaattaataacttcttcctgtacgggcgaatggccatttgctcctaactaactccgtactgctttgcggaacgagcgtagcgaactctccgaattactaagccttcatccctgatagatgcaaaaaacgaattaaaattatgtgtaaaaagaaaatgtgtctttatttagtagtcaaagttacaaaatattaagaatcaaattaataatgtattgggcagttaagtatataagtctttaaatatttatttgtattcaatatattaaggaggatcagccttatgaattcttacactgttggaacctatttagcagaacgtttagttcaaattggtctcaaacaccattttgcagtagctggtgattataatttagttttattggataacttattgttaaataagaatatggaacaagtgtattgttgtaatgaattaaactgtggtttttctgctgagggatatgctcgtgcaaaaggtgctgccgcagcagttgttacttattctgttggagcattaagtgcttttgacgctattggaggtgcttatgcagaaaatttacctgtaatcttaatctctggtgcacccaataacaacgatcacgctgctggtcatgtattgcatcatgctttaggtaaaaccgattatcattaccaattagaaatggcaaaaaatattaccgctgccgcagaagctatttatactcccgaagaagcacctgctaagatcgatcacgtaattaaaaccgctctccgtgagaaaaaacccgtatatttagaaatcgcttgcaatatcgcttctatgccttgtgcagctcctggacctgctagtgctttatttaacgatgaagcatctgatgaggctagtttaaatgccgctgttgaagaaactttgaaatttattgctaatcgtgataaagtagctgttttagttggttctaaactccgtgccgctggtgcagaagaagcggctgtaaaattcgcagatgccttaggaggtgctgttgccacaatggcagccgctaaaagttttttccccgaagaaaatcctcattacattggtacttcttggggtgaggtatcttaccctggtgtagaaaaaaccatgaaggaagctgatgcagtaattgcattagctcctgttttcaatgattactctaccactggttggactgatattccagaccccaaaaaattagttttagcagaacctcgctctgtagttgtgaatggtgttagatttcccagtgtacatctcaaagattatttaactcgtttagctcaaaaagtgagtaaaaagactggcgcactcgatttctttaaatctttaaatgctggtgaattaaagaaagcagctcctgctgatcccagtgctcctttagtgaatgccgaaatcgcaagacaagttgaagccttgttaactcctaacactaccgttattgccgagactggtgatagttggttcaatgctcaacgcatgaaattacccaatggtgctcgtgttgagtatgaaatgcaatggggtcacattggatggtctgttcctgctgcatttggatatgcagttggagcacctgagcgtagaaacattttaatggtaggtgatggttctttccaactcactgctcaagaagttgcacaaatggtacgtttaaaattgcctgttattatctttctcattaacaactatggttacaccattgaagttatgattcatgatggtccttataataacattaagaattgggattacgcaggtttaatggaggtatttaacggtaatggtggatacgacagtggagcaggtaaaggattaaaagctaaaacaggaggtgagttagctgaagcaattaaagtagctttagccaatacagatggtcctaccttaatcgaatgtttcattggacgtgaagattgtactgaagagttagttaaatggggaaagcgtgttgccgctgcaaattctcgtaaacctgtaaacaaactcttgtagttaggatccgagctcagcaagtttcatcccgaccccctcagggtcgggatttttttattgtactagttgacataagtaaaggcatcccctgcgtgatataattaccttcagtttaaggaggtatacacatatgattaaagcctacgctgccctggaagccaacggaaaactccaaccctttgaatacgaccccggtgccctgggtgctaatgaggtggagattgaggtgcagtattgtggggtgtgccacagtgatttgtccatgattaataacgaatggggcatttccaattaccccctagtgccgggtcatgaggtggtgggtactgtggccgccatgggcgaaggggtgaaccatgttgaggtgggggatttagtggggctgggttggcattcgggctactgcatgacctgccatagttgtttatctggctaccacaacctttgtgccacggcggaatcgaccattgtgggccactacggtggctttggcgatcgggttcgggccaagggagtcagcgtggtgaaattacctaaaggcattgacctagccagtgccgggccccttttctgtggaggaattaccgttttcagtcctatggtggaactgagtttaaagcccactgcaaaagtggcagtgatcggcattgggggcttgggccatttagcggtgcaatttctccgggcctggggctgtgaagtgactgcctttacctccagtgccaggaagcaaacggaagtgttggaattgggcgctcaccacatactagattccaccaatccagaggcgatcgccagtgcggaaggcaaatttgactatattatctccactgtgaacctgaagcttgactggaacttatacatcagcaccctggcgccccagggacatttccactttgttggggtggtgttggagcctttggatctaaatctttttccccttttgatgggacaacgctccgtttctgcctccccagtgggtagtcccgccaccattgccaccatgttggactttgctgtgcgccatgacattaaacccgtggtggaacaatttagctttgatcagatcaacgaggcgatcgcccatctagaaagcggcaaagcccattatcgggtagtgctcagccatagtaaaaattagctctgcaaaggttgcttctgggtccgtggaacgctcggttgccgccgggcgttttttattcctgcaggatcatcttgctgaaaaactcgagcgctcgttccgcaaagcggtacggagttagttaggggctaatgggcattctcccgtacaggaaagagttagaagttattaattatcaacaattctcctttgcctagtgcatcgttacctttttaattaaaacataaggaaaactaataatcgtaataatttaacctcaaagtgtaaagaaatgtgaaattctgacttttataacgttaaagagggaaaaattagcagtttaaaatacctagagaatagtctggggtaagcatagagaattagattagttaagttaatcaaattcagaaaaaataataatcgtaaatagttaatctgggtgtatagaaaatgatccccttcatgataagatttaaactcgaaaagcaaaagccaaaaaactaacttccattaaaagaagttgttacatataacgctataaagaaaatttatatatttggaggataccaaccatgtctcatattcaacgtgaaactagttgttctcgccctcgtttaaattctaatatggatgccgatttatatggttataaatgggctcgtgataatgttggtcaatctggtgctactatttatcgtttatatggtaaacctgatgctcctgaattattcttgaaacatggtaaaggttctgttgctaatgatgttactgatgaaatggttcgtttaaactggttgactgaatttatgcctttacctactattaaacattttattcgtactcccgatgatgcttggttattaactactgctattcctggtaaaactgcttttcaagttttagaagaatatcctgattctggtgaaaatattgttgatgctttagctgtttttttacgtcgtttacattctattcccgtttgtaattgtccttttaattctgatcgtgtttttcgtttagctcaagctcaatctcgtatgaataatggtttagttgatgcttctgattttgatgatgaacgtaatggttggcctgttgaacaagtttggaaagaaatgcacaaattgttacctttttctcctgattctgttgttactcatggtgatttttctttagataatttgatctttgatgaaggtaaattgattggttgtattgatgttggtcgtgttggtattgctgatcgttatcaagatttagctattttatggaattgtttaggtgaattttctccttctttacagaaacgtttatttcagaaatatggtattgataatcctgatatgaacaagttacaatttcatttaatgttggacgagttcttttaagaattaattcatgaccaaaatcccttaacgtgagttttcgttccactgagcgtcagaccccgtagaaaagatcaaaggatcttcttgagatcctttttttctgcgcgtaatctgctgctatttaaattacgtacacgtgttattactttgttaacgacaattgtcttaattaactgggcctcatgggccttccgctcactgcccgctttccagtcgggaaacctgtcgtgccagctctgcagatgacggtgaaaacctctgacacatgcagctcccggagacggtcacagcttgtctgtaagcggatgccgggagcagacaagcccgtcagggcgcgtcagcgggtgttggcgggtgtcggggcgcagccatgacccagtcacgtagcgatagcggagtgtatactggcttaactatgcggcatcagagcagattgtactgagagtgcaccatatgcggtgtgaaataccgcacagatgcgtaaggagaaaataccgcatcaggcgctcttccgcttcctcgctcactgactcgctgcgctcggtcgttcggctgcggcgagcggtatcagctcactcaaaggcggtaatacggttatccacagaatcaggggataacgcaggaaagaacatgtgagcaaaaggccagcaaaaggccaggaaccgtaaaaaggccgcgttgctggcgtttttccataggctccgcccccctgacgagcatcacaaaaatcgacgctcaagtcagaggtggcgaaacccgacaggactataaagataccaggcgtttccccctggaagctccctcgtgcgctctcctgttccgaccctgccgcttaccggatacctgtccgcctttctcccttcgggaagcgtggcgctttctcatagctcacgctgtaggtatctcagttcggtgtaggtcgttcgctccaagctgggctgtgtgcacgaaccccccgttcagcccgaccgctgcgccttatccggtaactatcgtcttgagtccaacccggtaagacacgacttatcgccactggcagcagccactggtaacaggattagcagagcgaggtatgtaggcggtgctacagagttcttgaagtggtggcctaactacggctacactagaaggacagtatttggtatctgcgctctgctgaagccagttaccttcggaaaaagagttggtagctcttgatccggcaaacaaaccaccgctggtagcggtggtttttttgtttgcaagcagcagattacgcgcagaaaaaaaggatctcaagaagatcctttgatcttttctactgcagaagcttgttagacaccctgtcatgtattttatattatttatttcaccatacggattaagtgaaacctaatgaaaatagtactttcggagctttaactttaatgaaggtatgtttttttatagacatcgatgtctggtttaacaataggaaaaagtagctaaaactcccatgaattaaagaaataacaaggtgtctaacaacctgttattaagaatgttagaaaagacttaacatttgtgttgagtttttatagacattggtgtctagacatacggtagataaggtttgctcaaaaataaaataaaaaaagattggactaaaaaacatttaatttagtacaatttaattagttattttttcgtctcaaattttgctttgttgagcagaaatttagataaaaaaatccccgtgatcagattacaatgtcgttcattgtacgatgtgtcgaaaaatctttacgacactctaaactgaccacacgggggaaaaagaaaactgaactaataacatcatgatactcggaaaacctagcaattctcaacccctaaacaaaagaaacttccaaaaccctgaccatataaaggagtggcaacaatcagcaatcagtcaagatttgatagcagaaaatcttgtatcggttgctaatggttttgatgtactatttatcggcaataaataccgaactaacacgggtgttctgtcacggcacatattaaactcctattctcatttagaagatggtggttcgtatggtagaacatttgacccatttaccaataaagaaatgcagtgggttcaatttaaaccgaatagaccaagaaaaggttctactggtaaggtaatcaaatatgaatcgccaaaaggtgaacctacaagagttctaatgccgtttgtgcctatgaaaatatggcaacggattagcgataagttcggagtaccgattaatccgaaaaaagatactcacttttgggaatgggtaaagaataatccatcgataccgattgccattacagaaggaaataaaaaagctaattgcctattatcctatggctatcctgctattgcctttgtaggcatttggaacggattagagaaaataaatgatttctcgaaggaaaagcagttaaaagaggatttgaaatggttgttatccaacggcaaccgaaatattaatatcatctttgaccaagaccagaaacaaaaaactgtaattaatgtaaacaaagctattttcgctttatcttctctaataagtagaaatggtcataaagttaatattgtgcaatggttgccgtcaaaaggtaaaggaatagatgattatttggtagctttaccttttgagaaaagagaaaatcatttagacaacttaattaaaattgcaccatcatttaatttttggtcaactaaatacttattcaagtgtcgtaaaccagatttaaccgtaaattgccgttatttgagcgatgcagtaaaagaattacctcaagaggatatagcattaatagcacctcacggcacgggtaaaacttcattagtagctactcacgttaagaatcggagttatcacggaaggaaaactatttcattggtgcatcttgaaagtttagccaaagctaatggcaacgcacttggattatattaccgaaccgaaaataatattgaaaagcaatatcttggatttagcttatgtgtagatagttgccgtgataagattaacggcattacaactgatattatttcaggtcaagattattgccttttcattgatgaaattgaccaagtaattccacacatccttaacagtgaaactgaagtaagtaagtatagatgcaccatcattgacactttttctgaactggtgagaaatgctgaacaggtcattattgctgatgctgatttatccgatgtgacgattgacctaatagaaaacatcagaggtaaaaaactatatgtaatcaagaatgaatatcagtatcagggaatgacttttaacgccgttggttcaccattagaaatgatggcaatgatgggaaaatcggtgtcagaaggcaagaaattatttattaacaccacatcccaaaaggcaaaaagtaagtacggcacaatcgctcttgagtcttatatttttggtctaaataaagaagcaaagatattaagaatagactctgaaaccactaaaaaccctgaacatccagcctataaaatcattgaccaagacttaaataatatcctcaaagattatgattatgtcattgcctcaccttgccttcaaacaggtgtcagtattaccttaaaagggcattttgaccagcaatttaacttttccagtggaaacattacacctcattgctttttacagcaaatgtggcggttgagggatgcagaaattgaaagattctattatgtgccgaactcatctaacctcaatctcattgggaataagtcaagttcaccatcagaccttctaaagagcaataacaagatggcaacggcaacggttaaccttttgggtagaatcgactccgaatattccctagagtatgaatcgcacggcatttggcttgagacgtgggcaaaattatcagcacggcataacagttcaatgcgttgttactctgaaattcttacctatctaattacgtctcaagggcataaattaaatatcaacattccctcacctcttgcagatattaagaagctaaatgatgaggtaagtagtaacagggaaaaggtaaaaaatgagagatactctcagaggttaaactcaccagatattaacgatgcagaagctaccatactcgaatctaaagagcaaaaaatcggattgactctcaatgagagatgcaccctagaaaagcataaagttaagaagcggtatgggaatgtaaagatggatattctcacctttgatgatgatggactataccccaaactcagactattttattacctcaccatcggtaaacctcatctcaaggctaatgacagaaaagctattgccaaaatgggcaatgacaataaaggcaagattctatcaaaagacttagttaataaaacttactccgctcgtgtgaaggtcttagagattcttaaactaactgactttatcgacaatcttagagatgaactcttaataactcccaataatccagctatcaccgattttaataatcttctgctaagagctaagaaggatttaagagtattaggagtcaacatcggaaaatatccaatggccaacattaatgccgtacttactctcattggtcacaaactttctgtaatgagagatgagttcggaaaagagaaaaggataaaagtagatggtaaatcataccgatgttatcaacttgaaacattaccagattttaccaatgatactcttgactactggttagaaaatgatagccaaaaagaagtaacagcaacagaaaattactccgaaaattttaacccttcaaatagctacaatccagacagtaagacactttcagagggtgcaaatttcctatatataaataaagaagaattgcatccaaataaattgcacctagaaataaaagaaggtgctgaactttttttattcggggtaaaggtgattgtgaaaggaatcttggacggggcagtaactatattctctatgggtcaagaatacgatttatccctcaatgaactagaggggatgttaacatcatgaactttacaagaatctttttaaagggcgatcgcaccatgttaaatgatggtacatttgttcagatatttgatatttaccatgaccacgcattgggagtgacccttgaccttaagacagaaaaaattatttccgatgatgttagggtaattactgtcaaagacttattgttcgatggcacttataaaggggtaaaatcttttatgcccgataatgcccgataatgcccgattgatgctacaaaatcccataatcataagcgataatcccctaatagcttgtaattcttgaaccgtagcgattttagagtattccaaaaagaagaaataaacaccgcaaaatgtcgtatttcacatatataaaccaaggttttttgccctaaaatctttatgtttgtagtgtgatgttgggtcaaaatggtcagaaaagttgcaaggtttttatggatgcttacgcgcgcgaggggtaagcatccccaaatagttactttatcctagtccatgcccatttattgccgtcccgttcggctttaaaaaagtgccaaaactcacaaggtgcaataaaaagttctgtacctttcgcaaccctagataatctttcaacagttactttttttcctattatctcggtacaaagtttggctagtttctcttttccctctttttcaatcaagccttcttgtatgcccaactcattgattaatctctctatttttaccattatttcccgttcaggtagtttatcccctaaatcttcatcggggggcaatgtagggcattctgaaggggctttttcttctgtctggacattatctaatattgaagtaaccaaactatcttcagttttttctattcctattaattcatattcggttactgtatccgtatcaatatccgaataactatctttatccgtattagctattcggttaagtttatccgttaactcagaaacaagactatatagcggttttagcttttcttctatcctgttatctaatacggataagtttatacggttatcattatccgtattagtatcattgggcttttttggtagttctaccccctcataaaccgcttttattcccaattccaacagactgataacagtatcctttataatgggttttttgctgatatggtgaacttttgccccttccatcattgcgatactttctatctcactcatcaacttatcgcttaagtgaatctcgtatctgtttaatcccttactggttttattcatatccgtttactttattcggttaacaattctattttatacgaataaaatattatacggttaactttatacgtttaactattttatctatacggataacagtaataagttattcgtattagttatacgtttacttttatccaaataaaattagtgcatttaaactaaaagaatgattttatcggagttgatagcattggattaacctaaagatgtttataagctatatctgataagtatttaaggttattttgttattctgtttattgacattatcagaataaaagaatagaatataattgttgagagataagaggtttaagtgattatggttaagaagttagttggttatgtcagggtcagtagtgaatcgcaagaggataacactagcttacagaatcagatagagagaattgaagcatattgtatggcttttggttatgagttggtaaaaatattcaaagaggttgccactggtacaaaagcagatattgaaacccgtcctatttttaatgaagctatagaatacttgaaacaggataatgctaatggaattattgccttgaagctagaccgaatcgcacggaatgctttagatgtattgcgtttggttcgtgaaaccttagaaccacaaaataaaatgttagtgttactagatattcaggtagatacttcgacaccttcaggaaaaatgattttaactgtaatgagtgccgttgctgaactcgaaagagacatgatctatgatcgcactcaggggggtagaaagactaaagcccaaaagggcgggtatgcctacgggaaacctaaatttggctataagactgaagaaaaggaactaaaagaagattcagcacaacaggaaactattaaactaattaagagacaccgtaggtcagggaaaagctaccagaaaatagctgattatctcaatgcccaaagtattcccactaaacaaggtaagaaatggagttctagcgtcgtctatcgaatctgtcaggaaaaagctggttaagtctgtttatagatatttagaatttattgaataaaaatagtatgaacaataaatatttatggactaaccacgctcggaaacgtttaactgaacgatgggaaataaaagaatcatgggttattgataccatcgaaaatcctgaacgttcagaatttattgttgatgagtcaggggaaaaatatcattactataaaagaatagctaagtttaagaatagagtgttagaagtgataacttctgccaactcaacacccacaagaataataaccttttactttaaccgtaacatgaggaaaaatttatgattgttacttacgataatgaagttgacgcaatttattttaagttaacggaaaataaaattgatagcaccgaacctcaaacagacaggattatcattgattacgatgaaagtaataatattgttggcattgaggtattagattttaattatcttgtcaagaaaggtttaaccgttgctgatttacctttttctgaagatgaaagattaacagcttctcaatattttaattttcctgttgctatctaatccagaaggggcaataatccccttctttcatcgagttagacttaatatcacaaaagtcattttcattttaccgtttcttttccacagcgtccgtacgcccctcgttaaatctcaaaaccgacaatttatgatgtttataaaaagttactcactttaataagtatttatactcattaaagggttattctttttttgtagcctgataggttgggaaggaatatttcagattatcagatttgttgaatatttttcgtcagatacgcaaaccttacaaacataattaacaactgaaactattgatatgtctaggttttagctctatcacaggttggatctg

SEQ ID NO: 73 - DNA, 12552 bp, Cyanobacterium sp. ABICyano1
tcgactaagccttcatccctgatagatgcaaaaaacgcattaaaattatgcgtaaaaagcatatttgtctttatttagtaatcaaagttacaaattattaagaatcaaattaataatatattgggcagttaagtatataagtctttaaatatttatttgtattcaatatattaaggaggtgatcattatgaattcttacactgttggaacctatttagcagaacgtttagttcaaattggtctcaaacaccattttgcagtagctggtgattataatttagttttattggataacttattgttaaataagaatatggaacaagtgtattgttgtaatgaattaaactgtggtttttctgctgagggatatgctcgtgcaaaaggtgctgccgcagcagttgttacttattctgttggagcattaagtgcttttgacgctattggaggtgcttatgcagaaaatttacctgtaatcttaatctctggtgcacccaataacaacgatcacgctgctggtcatgtattgcatcatgctttaggtaaaaccgattatcattaccaattagaaatggcaaaaaatattaccgctgccgcagaagctatttatactcccgaagaagcacctgctaagatcgatcacgtaattaaaaccgctctccgtgagaaaaaacccgtatatttagaaatcgcttgcaatatcgcttctatgccttgtgcagctcctggacctgctagtgctttatttaacgatgaagcatctgatgaggctagtttaaatgccgctgttgaagaaactttgaaatttattgctaatcgtgataaagtagctgttttagttggttctaaactccgtgccgctggtgcagaagaagcggctgtaaaattcgcagatgccttaggaggtgctgttgccacaatggcagccgctaaaagttttttccccgaagaaaatcctcattacattggtacttcttggggtgaggtatcttaccctggtgtagaaaaaaccatgaaggaagctgatgcagtaattgcattagctcctgttttcaatgattactctaccactggttggactgatattccagaccccaaaaaattagttttagcagaacctcgctctgtagttgtgaatggtgttagatttcccagtgtacatctcaaagattatttaactcgtttagctcaaaaagtgagtaaaaagactggcgcactcgatttctttaaatctttaaatgctggtgaattaaagaaagcagctcctgctgatcccagtgctcctttagtgaatgccgaaatcgcaagacaagttgaagccttgttaactcctaacactaccgttattgccgagactggtgatagttggttcaatgctcaacgcatgaaattacccaatggtgctcgtgttgagtatgaaatgcaatggggtcacattggatggtctgttcctgctgcatttggatatgcagttggagcacctgagcgtagaaacattttaatggtaggtgatggttctttccaactcactgctcaagaagttgcacaaatggtacgtttaaaattgcctgttattatctttctcattaacaactatggttacaccattgaagttatgattcatgatggtccttataataacattaagaattgggattacgcaggtttaatggaggtatttaacggtaatggtggatacgacagtggagcaggtaaaggattaaaagctaaaacaggaggtgagttagctgaagcaattaaagtagctttagccaatacagatggtcctaccttaatcgaatgtttcattggacgtgaagattgtactgaagagttagttaaatggggaaagcgtgttgccgctgcaaattctcgtaaacctgtaaacaaactcttgtagttaggatccgagctcagcaagtttcatcccgaccccctcagggtcgggatttttttattgtactagttgacataagtaaaggcatcccctgcgtgatataattaccttcagtttaaggaggtatacacatatgattaaagcctacgctgccctggaagccaacggaaaactccaaccctttgaatacgaccccggtgccctgggtgctaatgaggtggagattgaggtgcagtattgtggggtgtgccacagtgatttgtccatgattaataacgaatggggcatttccaattaccccctagtgccgggtcatgaggtggtgggtactgtggccgccatgggcgaaggggtgaaccatgttgaggtgggggatttagtggggctgggttggcattcgggctactgcatgacctgccatagttgtttatctggctaccacaacctttgtgccacggcggaatcgaccattgtgggccactacggtggctttggcgatcgggttcgggccaagggagtcagcgtggtgaaattacctaaaggcattgacctagccagtgccgggccccttttctgtggaggaattaccgttttcagtcctatggtggaactgagtttaaagcccactgcaaaagtggcagtgatcggcattgggggcttgggccatttagcggtgcaatttctccgggcctggggctgtgaagtgactgcctttacctccagtgccaggaagcaaacggaagtgttggaattgggcgctcaccacatactagattccaccaatccagaggcgatcgccagtgcggaaggcaaatttgactatattatctccactgtgaacctgaagcttgactggaacttatacatcagcaccctggcgccccagggacatttccactttgttggggtggtgttggagcctttggatctaaatctttttccccttttgatgggacaacgctccgtttctgcctccccagtgggtagtcccgccaccattgccaccatgttggactttgctgtgcgccatgacattaaacccgtggtggaacaatttagctttgatcagatcaacgaggcgatcgcccatctagaaagcggcaaagcccattatcgggtagtgctcagccatagtaaaaattagctctgcaaaggttgcttctgggtccgtggaacgctcggttgccgccgggcgttttttattcctgcaggatcatcttgctgaaaaactcgagcgctcgttccgcaaagcggtacggagttagttaggggctaatgggcattctcccgtacaggaaagagttagaagttattaattatcaacaattctcctttgcctagtgcatcgttacctttttaattaaaacataaggaaaactaataatcgtaataatttaacctcaaagtgtaaagaaatgtgaaattctgacttttataacgttaaagagggaaaaattagcagtttaaaatacctagagaatagtctggggtaagcatagagaattagattagttaagttaatcaaattcagaaaaaataataatcgtaaatagttaatctgggtgtatagaaaatgatccccttcatgataagatttaaactcgaaaagcaaaagccaaaaaactaacttccattaaaagaagttgttacatataacgctataaagaaaatttatatatttggaggataccaaccatgtctcatattcaacgtgaaactagttgttctcgccctcgtttaaattctaatatggatgccgatttatatggttataaatgggctcgtgataatgttggtcaatctggtgctactatttatcgtttatatggtaaacctgatgctcctgaattattcttgaaacatggtaaaggttctgttgctaatgatgttactgatgaaatggttcgtttaaactggttgactgaatttatgcctttacctactattaaacattttattcgtactcccgatgatgcttggttattaactactgctattcctggtaaaactgcttttcaagttttagaagaatatcctgattctggtgaaaatattgttgatgctttagctgtttttttacgtcgtttacattctattcccgtttgtaattgtccttttaattctgatcgtgtttttcgtttagctcaagctcaatctcgtatgaataatggtttagttgatgcttctgattttgatgatgaacgtaatggttggcctgttgaacaagtttggaaagaaatgcacaaattgttacctttttctcctgattctgttgttactcatggtgatttttctttagataatttgatctttgatgaaggtaaattgattggttgtattgatgttggtcgtgttggtattgctgatcgttatcaagatttagctattttatggaattgtttaggtgaattttctccttctttacagaaacgtttatttcagaaatatggtattgataatcctgatatgaacaagttacaatttcatttaatgttggacgagttcttttaagaattaattcatgaccaaaatcccttaacgtgagttttcgttccactgagcgtcagaccccgtagaaaagatcaaaggatcttcttgagatcctttttttctgcgcgtaatctgctgctatttaaattacgtacacgtgttattactttgttaacgacaattgtcttaattaactgggcctcatgggccttccgctcactgcccgctttccagtcgggaaacctgtcgtgccagctctgcagatgacggtgaaaacctctgacacatgcagctcccggagacggtcacagcttgtctgtaagcggatgccgggagcagacaagcccgtcagggcgcgtcagcgggtgttggcgggtgtcggggcgcagccatgacccagtcacgtagcgatagcggagtgtatactggcttaactatgcggcatcagagcagattgtactgagagtgcaccatatgcggtgtgaaataccgcacagatgcgtaaggagaaaataccgcatcaggcgctcttccgcttcctcgctcactgactcgctgcgctcggtcgttcggctgcggcgagcggtatcagctcactcaaaggcggtaatacggttatccacagaatcaggggataacgcaggaaagaacatgtgagcaaaaggccagcaaaaggccaggaaccgtaaaaaggccgcgttgctggcgtttttccataggctccgcccccctgacgagcatcacaaaaatcgacgctcaagtcagaggtggcgaaacccgacaggactataaagataccaggcgtttccccctggaagctccctcgtgcgctctcctgttccgaccctgccgcttaccggatacctgtccgcctttctcccttcgggaagcgtggcgctttctcatagctcacgctgtaggtatctcagttcggtgtaggtcgttcgctccaagctgggctgtgtgcacgaaccccccgttcagcccgaccgctgcgccttatccggtaactatcgtcttgagtccaacccggtaagacacgacttatcgccactggcagcagccactggtaacaggattagcagagcgaggtatgtaggcggtgctacagagttcttgaagtggtggcctaactacggctacactagaaggacagtatttggtatctgcgctctgctgaagccagttaccttcggaaaaagagttggtagctcttgatccggcaaacaaaccaccgctggtagcggtggtttttttgtttgcaagcagcagattacgcgcagaaaaaaaggatctcaagaagatcctttgatcttttctactgcagaagcttgttagacaccctgtcatgtattttatattatttatttcaccatacggattaagtgaaacctaatgaaaatagtactttcggagctttaactttaatgaaggtatgtttttttatagacatcgatgtctggtttaacaataggaaaaagtagctaaaactcccatgaattaaagaaataacaaggtgtctaacaacctgttattaagaatgttagaaaagacttaacatttgtgttgagtttttatagacattggtgtctagacatacggtagataaggtttgctcaaaaataaaataaaaaaagattggactaaaaaacatttaatttagtacaatttaattagttattttttcgtctcaaattttgctttgttgagcagaaatttagataaaaaaatccccgtgatcagattacaatgtcgttcattgtacgatgtgtcgaaaaatctttacgacactctaaactgaccacacgggggaaaaagaaaactgaactaataacatcatgatactcggaaaacctagcaattctcaacccctaaacaaaagaaacttccaaaaccctgaccatataaaggagtggcaacaatcagcaatcagtcaagatttgatagcagaaaatcttgtatcggttgctaatggttttgatgtactatttatcggcaataaataccgaactaacacgggtgttctgtcacggcacatattaaactcctattctcatttagaagatggtggttcgtatggtagaacatttgacccatttaccaataaagaaatgcagtgggttcaatttaaaccgaatagaccaagaaaaggttctactggtaaggtaatcaaatatgaatcgccaaaaggtgaacctacaagagttctaatgccgtttgtgcctatgaaaatatggcaacggattagcgataagttcggagtaccgattaatccgaaaaaagatactcacttttgggaatgggtaaagaataatccatcgataccgattgccattacagaaggaaataaaaaagctaattgcctattatcctatggctatcctgctattgcctttgtaggcatttggaacggattagagaaaataaatgatttctcgaaggaaaagcagttaaaagaggatttgaaatggttgttatccaacggcaaccgaaatattaatatcatctttgaccaagaccagaaacaaaaaactgtaattaatgtaaacaaagctattttcgctttatcttctctaataagtagaaatggtcataaagttaatattgtgcaatggttgccgtcaaaaggtaaaggaatagatgattatttggtagctttaccttttgagaaaagagaaaatcatttagacaacttaattaaaattgcaccatcatttaatttttggtcaactaaatacttattcaagtgtcgtaaaccagatttaaccgtaaattgccgttatttgagcgatgcagtaaaagaattacctcaagaggatatagcattaatagcacctcacggcacgggtaaaacttcattagtagctactcacgttaagaatcggagttatcacggaaggaaaactatttcattggtgcatcttgaaagtttagccaaagctaatggcaacgcacttggattatattaccgaaccgaaaataatattgaaaagcaatatcttggatttagcttatgtgtagatagttgccgtgataagattaacggcattacaactgatattatttcaggtcaagattattgccttttcattgatgaaattgaccaagtaattccacacatccttaacagtgaaactgaagtaagtaagtatagatgcaccatcattgacactttttctgaactggtgagaaatgctgaacaggtcattattgctgatgctgatttatccgatgtgacgattgacctaatagaaaacatcagaggtaaaaaactatatgtaatcaagaatgaatatcagtatcagggaatgacttttaacgccgttggttcaccattagaaatgatggcaatgatgggaaaatcggtgtcagaaggcaagaaattatttattaacaccacatcccaaaaggcaaaaagtaagtacggcacaatcgctcttgagtcttatatttttggtctaaataaagaagcaaagatattaagaatagactctgaaaccactaaaaaccctgaacatccagcctataaaatcattgaccaagacttaaataatatcctcaaagattatgattatgtcattgcctcaccttgccttcaaacaggtgtcagtattaccttaaaagggcattttgaccagcaatttaacttttccagtggaaacattacacctcattgctttttacagcaaatgtggcggttgagggatgcagaaattgaaagattctattatgtgccgaactcatctaacctcaatctcattgggaataagtcaagttcaccatcagaccttctaaagagcaataacaagatggcaacggcaacggttaaccttttgggtagaatcgactccgaatattccctagagtatgaatcgcacggcatttggcttgagacgtgggcaaaattatcagcacggcataacagttcaatgcgttgttactctgaaattcttacctatctaattacgtctcaagggcataaattaaatatcaacattccctcacctcttgcagatattaagaagctaaatgatgaggtaagtagtaacagggaaaaggtaaaaaatgagagatactctcagaggttaaactcaccagatattaacgatgcagaagctaccatactcgaatctaaagagcaaaaaatcggattgactctcaatgagagatgcaccctagaaaagcataaagttaagaagcggtatgggaatgtaaagatggatattctcacctttgatgatgatggactataccccaaactcagactattttattacctcaccatcggtaaacctcatctcaaggctaatgacagaaaagctattgccaaaatgggcaatgacaataaaggcaagattctatcaaaagacttagttaataaaacttactccgctcgtgtgaaggtcttagagattcttaaactaactgactttatcgacaatcttagagatgaactcttaataactcccaataatccagctatcaccgattttaataatcttctgctaagagctaagaaggatttaagagtattaggagtcaacatcggaaaatatccaatggccaacattaatgccgtacttactctcattggtcacaaactttctgtaatgagagatgagttcggaaaagagaaaaggataaaagtagatggtaaatcataccgatgttatcaacttgaaacattaccagattttaccaatgatactcttgactactggttagaaaatgatagccaaaaagaagtaacagcaacagaaaattactccgaaaattttaacccttcaaatagctacaatccagacagtaagacactttcagagggtgcaaatttcctatatataaataaagaagaattgcatccaaataaattgcacctagaaataaaagaaggtgctgaactttttttattcggggtaaaggtgattgtgaaaggaatcttggacggggcagtaactatattctctatgggtcaagaatacgatttatccctcaatgaactagaggggatgttaacatcatgaactttacaagaatctttttaaagggcgatcgcaccatgttaaatgatggtacatttgttcagatatttgatatttaccatgaccacgcattgggagtgacccttgaccttaagacagaaaaaattatttccgatgatgttagggtaattactgtcaaagacttattgttcgatggcacttataaaggggtaaaatcttttatgcccgataatgcccgataatgcccgattgatgctacaaaatcccataatcataagcgataatcccctaatagcttgtaattcttgaaccgtagcgattttagagtattccaaaaagaagaaataaacaccgcaaaatgtcgtatttcacatatataaaccaaggttttttgccctaaaatctttatgtttgtagtgtgatgttgggtcaaaatggtcagaaaagttgcaaggtttttatggatgcttacgcgcgcgaggggtaagcatccccaaatagttactttatcctagtccatgcccatttattgccgtcccgttcggctttaaaaaagtgccaaaactcacaaggtgcaataaaaagttctgtacctttcgcaaccctagataatctttcaacagttactttttttcctattatctcggtacaaagtttggctagtttctcttttccctctttttcaatcaagccttcttgtatgcccaactcattgattaatctctctatttttaccattatttcccgttcaggtagtttatcccctaaatcttcatcggggggcaatgtagggcattctgaaggggctttttcttctgtctggacattatctaatattgaagtaaccaaactatcttcagttttttctattcctattaattcatattcggttactgtatccgtatcaatatccgaataactatctttatccgtattagctattcggttaagtttatccgttaactcagaaacaagactatatagcggttttagcttttcttctatcctgttatctaatacggataagtttatacggttatcattatccgtattagtatcattgggcttttttggtagttctaccccctcataaaccgcttttattcccaattccaacagactgataacagtatcctttataatgggttttttgctgatatggtgaacttttgccccttccatcattgcgatactttctatctcactcatcaacttatcgcttaagtgaatctcgtatctgtttaatcccttactggttttattcatatccgtttactttattcggttaacaattctattttatacgaataaaatattatacggttaactttatacgtttaactattttatctatacggataacagtaataagttattcgtattagttatacgtttacttttatccaaataaaattagtgcatttaaactaaaagaatgattttatcggagttgatagcattggattaacctaaagatgtttataagctatatctgataagtatttaaggttattttgttattctgtttattgacattatcagaataaaagaatagaatataattgttgagagataagaggtttaagtgattatggttaagaagttagttggttatgtcagggtcagtagtgaatcgcaagaggataacactagcttacagaatcagatagagagaattgaagcatattgtatggcttttggttatgagttggtaaaaatattcaaagaggttgccactggtacaaaagcagatattgaaacccgtcctatttttaatgaagctatagaatacttgaaacaggataatgctaatggaattattgccttgaagctagaccgaatcgcacggaatgctttagatgtattgcgtttggttcgtgaaaccttagaaccacaaaataaaatgttagtgttactagatattcaggtagatacttcgacaccttcaggaaaaatgattttaactgtaatgagtgccgttgctgaactcgaaagagacatgatctatgatcgcactcaggggggtagaaagactaaagcccaaaagggcgggtatgcctacgggaaacctaaatttggctataagactgaagaaaaggaactaaaagaagattcagcacaacaggaaactattaaactaattaagagacaccgtaggtcagggaaaagctaccagaaaatagctgattatctcaatgcccaaagtattcccactaaacaaggtaagaaatggagttctagcgtcgtctatcgaatctgtcaggaaaaagctggttaagtctgtttatagatatttagaatttattgaataaaaatagtatgaacaataaatatttatggactaaccacgctcggaaacgtttaactgaacgatgggaaataaaagaatcatgggttattgataccatcgaaaatcctgaacgttcagaatttattgttgatgagtcaggggaaaaatatcattactataaaagaatagctaagtttaagaatagagtgttagaagtgataacttctgccaactcaacacccacaagaataataaccttttactttaaccgtaacatgaggaaaaatttatgattgttacttacgataatgaagttgacgcaatttattttaagttaacggaaaataaaattgatagcaccgaacctcaaacagacaggattatcattgattacgatgaaagtaataatattgttggcattgaggtattagattttaattatcttgtcaagaaaggtttaaccgttgctgatttacctttttctgaagatgaaagattaacagcttctcaatattttaattttcctgttgctatctaatccagaaggggcaataatccccttctttcatcgagttagacttaatatcacaaaagtcattttcattttaccgtttcttttccacagcgtccgtacgcccctcgttaaatctcaaaaccgacaatttatgatgtttataaaaagttactcactttaataagtatttatactcattaaagggttattctttttttgtagcctgataggttgggaaggaatatttcagattatcagatttgttgaatatttttcgtcagatacgcaaaccttacaaacataattaacaactgaaactattgatatgtctaggttttagctctatcacaggttggatctg

SEQ ID NO: 74 - DNA, 12648 bp, Cyanobacterium sp. ABICyano1
tcgacaattaataacttcttcctgtacgggcgaatggccatttgctcctaactaactccgtactgctttgcggaacgagcgtagcgaactctccgaattactaagccttcatccctgatagatgcaaaaaacgcattaaaattatgcgtaaaaagcatatttgtctttatttagtaatcaaagttacaaattattaagaatcaaattaataatatattgggcagttaagtatataagtctttaaatatttatttgtattcaatatattaaccgaggacaaattatgaattcttacactgttggaacctatttagcagaacgtttagttcaaattggtctcaaacaccattttgcagtagctggtgattataatttagttttattggataacttattgttaaataagaatatggaacaagtgtattgttgtaatgaattaaactgtggtttttctgctgagggatatgctcgtgcaaaaggtgctgccgcagcagttgttacttattctgttggagcattaagtgcttttgacgctattggaggtgcttatgcagaaaatttacctgtaatcttaatctctggtgcacccaataacaacgatcacgctgctggtcatgtattgcatcatgctttaggtaaaaccgattatcattaccaattagaaatggcaaaaaatattaccgctgccgcagaagctatttatactcccgaagaagcacctgctaagatcgatcacgtaattaaaaccgctctccgtgagaaaaaacccgtatatttagaaatcgcttgcaatatcgcttctatgccttgtgcagctcctggacctgctagtgctttatttaacgatgaagcatctgatgaggctagtttaaatgccgctgttgaagaaactttgaaatttattgctaatcgtgataaagtagctgttttagttggttctaaactccgtgccgctggtgcagaagaagcggctgtaaaattcgcagatgccttaggaggtgctgttgccacaatggcagccgctaaaagttttttccccgaagaaaatcctcattacattggtacttcttggggtgaggtatcttaccctggtgtagaaaaaaccatgaaggaagctgatgcagtaattgcattagctcctgttttcaatgattactctaccactggttggactgatattccagaccccaaaaaattagttttagcagaacctcgctctgtagttgtgaatggtgttagatttcccagtgtacatctcaaagattatttaactcgtttagctcaaaaagtgagtaaaaagactggcgcactcgatttctttaaatctttaaatgctggtgaattaaagaaagcagctcctgctgatcccagtgctcctttagtgaatgccgaaatcgcaagacaagttgaagccttgttaactcctaacactaccgttattgccgagactggtgatagttggttcaatgctcaacgcatgaaattacccaatggtgctcgtgttgagtatgaaatgcaatggggtcacattggatggtctgttcctgctgcatttggatatgcagttggagcacctgagcgtagaaacattttaatggtaggtgatggttctttccaactcactgctcaagaagttgcacaaatggtacgtttaaaattgcctgttattatctttctcattaacaactatggttacaccattgaagttatgattcatgatggtccttataataacattaagaattgggattacgcaggtttaatggaggtatttaacggtaatggtggatacgacagtggagcaggtaaaggattaaaagctaaaacaggaggtgagttagctgaagcaattaaagtagctttagccaatacagatggtcctaccttaatcgaatgtttcattggacgtgaagattgtactgaagagttagttaaatggggaaagcgtgttgccgctgcaaattctcgtaaacctgtaaacaaactcttgtagttaggatccgagctcagcaagtttcatcccgaccccctcagggtcgggatttttttattgtactagttgacataagtaaaggcatcccctgcgtgatataattaccttcagtttaaggaggtatacacatatgattaaagcctacgctgccctggaagccaacggaaaactccaaccctttgaatacgaccccggtgccctgggtgctaatgaggtggagattgaggtgcagtattgtggggtgtgccacagtgatttgtccatgattaataacgaatggggcatttccaattaccccctagtgccgggtcatgaggtggtgggtactgtggccgccatgggcgaaggggtgaaccatgttgaggtgggggatttagtggggctgggttggcattcgggctactgcatgacctgccatagttgtttatctggctaccacaacctttgtgccacggcggaatcgaccattgtgggccactacggtggctttggcgatcgggttcgggccaagggagtcagcgtggtgaaattacctaaaggcattgacctagccagtgccgggccccttttctgtggaggaattaccgttttcagtcctatggtggaactgagtttaaagcccactgcaaaagtggcagtgatcggcattgggggcttgggccatttagcggtgcaatttctccgggcctggggctgtgaagtgactgcctttacctccagtgccaggaagcaaacggaagtgttggaattgggcgctcaccacatactagattccaccaatccagaggcgatcgccagtgcggaaggcaaatttgactatattatctccactgtgaacctgaagcttgactggaacttatacatcagcaccctggcgccccagggacatttccactttgttggggtggtgttggagcctttggatctaaatctttttccccttttgatgggacaacgctccgtttctgcctccccagtgggtagtcccgccaccattgccaccatgttggactttgctgtgcgccatgacattaaacccgtggtggaacaatttagctttgatcagatcaacgaggcgatcgcccatctagaaagcggcaaagcccattatcgggtagtgctcagccatagtaaaaattagctctgcaaaggttgcttctgggtccgtggaacgctcggttgccgccgggcgttttttattcctgcaggatcatcttgctgaaaaactcgagcgctcgttccgcaaagcggtacggagttagttaggggctaatgggcattctcccgtacaggaaagagttagaagttattaattatcaacaattctcctttgcctagtgcatcgttacctttttaattaaaacataaggaaaactaataatcgtaataatttaacctcaaagtgtaaagaaatgtgaaattctgacttttataacgttaaagagggaaaaattagcagtttaaaatacctagagaatagtctggggtaagcatagagaattagattagttaagttaatcaaattcagaaaaaataataatcgtaaatagttaatctgggtgtatagaaaatgatccccttcatgataagatttaaactcgaaaagcaaaagccaaaaaactaacttccattaaaagaagttgttacatataacgctataaagaaaatttatatatttggaggataccaaccatgtctcatattcaacgtgaaactagttgttctcgccctcgtttaaattctaatatggatgccgatttatatggttataaatgggctcgtgataatgttggtcaatctggtgctactatttatcgtttatatggtaaacctgatgctcctgaattattcttgaaacatggtaaaggttctgttgctaatgatgttactgatgaaatggttcgtttaaactggttgactgaatttatgcctttacctactattaaacattttattcgtactcccgatgatgcttggttattaactactgctattcctggtaaaactgcttttcaagttttagaagaatatcctgattctggtgaaaatattgttgatgctttagctgtttttttacgtcgtttacattctattcccgtttgtaattgtccttttaattctgatcgtgtttttcgtttagctcaagctcaatctcgtatgaataatggtttagttgatgcttctgattttgatgatgaacgtaatggttggcctgttgaacaagtttggaaagaaatgcacaaattgttacctttttctcctgattctgttgttactcatggtgatttttctttagataatttgatctttgatgaaggtaaattgattggttgtattgatgttggtcgtgttggtattgctgatcgttatcaagatttagctattttatggaattgtttaggtgaattttctccttctttacagaaacgtttatttcagaaatatggtattgataatcctgatatgaacaagttacaatttcatttaatgttggacgagttcttttaagaattaattcatgaccaaaatcccttaacgtgagttttcgttccactgagcgtcagaccccgtagaaaagatcaaaggatcttcttgagatcctttttttctgcgcgtaatctgctgctatttaaattacgtacacgtgttattactttgttaacgacaattgtcttaattaactgggcctcatgggccttccgctcactgcccgctttccagtcgggaaacctgtcgtgccagctctgcagatgacggtgaaaacctctgacacatgcagctcccggagacggtcacagcttgtctgtaagcggatgccgggagcagacaagcccgtcagggcgcgtcagcgggtgttggcgggtgtcggggcgcagccatgacccagtcacgtagcgatagcggagtgtatactggcttaactatgcggcatcagagcagattgtactgagagtgcaccatatgcggtgtgaaataccgcacagatgcgtaaggagaaaataccgcatcaggcgctcttccgcttcctcgctcactgactcgctgcgctcggtcgttcggctgcggcgagcggtatcagctcactcaaaggcggtaatacggttatccacagaatcaggggataacgcaggaaagaacatgtgagcaaaaggccagcaaaaggccaggaaccgtaaaaaggccgcgttgctggcgtttttccataggctccgcccccctgacgagcatcacaaaaatcgacgctcaagtcagaggtggcgaaacccgacaggactataaagataccaggcgtttccccctggaagctccctcgtgcgctctcctgttccgaccctgccgcttaccggatacctgtccgcctttctcccttcgggaagcgtggcgctttctcatagctcacgctgtaggtatctcagttcggtgtaggtcgttcgctccaagctgggctgtgtgcacgaaccccccgttcagcccgaccgctgcgccttatccggtaactatcgtcttgagtccaacccggtaagacacgacttatcgccactggcagcagccactggtaacaggattagcagagcgaggtatgtaggcggtgctacagagttcttgaagtggtggcctaactacggctacactagaaggacagtatttggtatctgcgctctgctgaagccagttaccttcggaaaaagagttggtagctcttgatccggcaaacaaaccaccgctggtagcggtggtttttttgtttgcaagcagcagattacgcgcagaaaaaaaggatctcaagaagatcctttgatcttttctactgcagaagcttgttagacaccctgtcatgtattttatattatttatttcaccatacggattaagtgaaacctaatgaaaatagtactttcggagctttaactttaatgaaggtatgtttttttatagacatcgatgtctggtttaacaataggaaaaagtagctaaaactcccatgaattaaagaaataacaaggtgtctaacaacctgttattaagaatgttagaaaagacttaacatttgtgttgagtttttatagacattggtgtctagacatacggtagataaggtttgctcaaaaataaaataaaaaaagattggactaaaaaacatttaatttagtacaatttaattagttattttttcgtctcaaattttgctttgttgagcagaaatttagataaaaaaatccccgtgatcagattacaatgtcgttcattgtacgatgtgtcgaaaaatctttacgacactctaaactgaccacacgggggaaaaagaaaactgaactaataacatcatgatactcggaaaacctagcaattctcaacccctaaacaaaagaaacttccaaaaccctgaccatataaaggagtggcaacaatcagcaatcagtcaagatttgatagcagaaaatcttgtatcggttgctaatggttttgatgtactatttatcggcaataaataccgaactaacacgggtgttctgtcacggcacatattaaactcctattctcatttagaagatggtggttcgtatggtagaacatttgacccatttaccaataaagaaatgcagtgggttcaatttaaaccgaatagaccaagaaaaggttctactggtaaggtaatcaaatatgaatcgccaaaaggtgaacctacaagagttctaatgccgtttgtgcctatgaaaatatggcaacggattagcgataagttcggagtaccgattaatccgaaaaaagatactcacttttgggaatgggtaaagaataatccatcgataccgattgccattacagaaggaaataaaaaagctaattgcctattatcctatggctatcctgctattgcctttgtaggcatttggaacggattagagaaaataaatgatttctcgaaggaaaagcagttaaaagaggatttgaaatggttgttatccaacggcaaccgaaatattaatatcatctttgaccaagaccagaaacaaaaaactgtaattaatgtaaacaaagctattttcgctttatcttctctaataagtagaaatggtcataaagttaatattgtgcaatggttgccgtcaaaaggtaaaggaatagatgattatttggtagctttaccttttgagaaaagagaaaatcatttagacaacttaattaaaattgcaccatcatttaatttttggtcaactaaatacttattcaagtgtcgtaaaccagatttaaccgtaaattgccgttatttgagcgatgcagtaaaagaattacctcaagaggatatagcattaatagcacctcacggcacgggtaaaacttcattagtagctactcacgttaagaatcggagttatcacggaaggaaaactatttcattggtgcatcttgaaagtttagccaaagctaatggcaacgcacttggattatattaccgaaccgaaaataatattgaaaagcaatatcttggatttagcttatgtgtagatagttgccgtgataagattaacggcattacaactgatattatttcaggtcaagattattgccttttcattgatgaaattgaccaagtaattccacacatccttaacagtgaaactgaagtaagtaagtatagatgcaccatcattgacactttttctgaactggtgagaaatgctgaacaggtcattattgctgatgctgatttatccgatgtgacgattgacctaatagaaaacatcagaggtaaaaaactatatgtaatcaagaatgaatatcagtatcagggaatgacttttaacgccgttggttcaccattagaaatgatggcaatgatgggaaaatcggtgtcagaaggcaagaaattatttattaacaccacatcccaaaaggcaaaaagtaagtacggcacaatcgctcttgagtcttatatttttggtctaaataaagaagcaaagatattaagaatagactctgaaaccactaaaaaccctgaacatccagcctataaaatcattgaccaagacttaaataatatcctcaaagattatgattatgtcattgcctcaccttgccttcaaacaggtgtcagtattaccttaaaagggcattttgaccagcaatttaacttttccagtggaaacattacacctcattgctttttacagcaaatgtggcggttgagggatgcagaaattgaaagattctattatgtgccgaactcatctaacctcaatctcattgggaataagtcaagttcaccatcagaccttctaaagagcaataacaagatggcaacggcaacggttaaccttttgggtagaatcgactccgaatattccctagagtatgaatcgcacggcatttggcttgagacgtgggcaaaattatcagcacggcataacagttcaatgcgttgttactctgaaattcttacctatctaattacgtctcaagggcataaattaaatatcaacattccctcacctcttgcagatattaagaagctaaatgatgaggtaagtagtaacagggaaaaggtaaaaaatgagagatactctcagaggttaaactcaccagatattaacgatgcagaagctaccatactcgaatctaaagagcaaaaaatcggattgactctcaatgagagatgcaccctagaaaagcataaagttaagaagcggtatgggaatgtaaagatggatattctcacctttgatgatgatggactataccccaaactcagactattttattacctcaccatcggtaaacctcatctcaaggctaatgacagaaaagctattgccaaaatgggcaatgacaataaaggcaagattctatcaaaagacttagttaataaaacttactccgctcgtgtgaaggtcttagagattcttaaactaactgactttatcgacaatcttagagatgaactcttaataactcccaataatccagctatcaccgattttaataatcttctgctaagagctaagaaggatttaagagtattaggagtcaacatcggaaaatatccaatggccaacattaatgccgtacttactctcattggtcacaaactttctgtaatgagagatgagttcggaaaagagaaaaggataaaagtagatggtaaatcataccgatgttatcaacttgaaacattaccagattttaccaatgatactcttgactactggttagaaaatgatagccaaaaagaagtaacagcaacagaaaattactccgaaaattttaacccttcaaatagctacaatccagacagtaagacactttcagagggtgcaaatttcctatatataaataaagaagaattgcatccaaataaattgcacctagaaataaaagaaggtgctgaactttttttattcggggtaaaggtgattgtgaaaggaatcttggacggggcagtaactatattctctatgggtcaagaatacgatttatccctcaatgaactagaggggatgttaacatcatgaactttacaagaatctttttaaagggcgatcgcaccatgttaaatgatggtacatttgttcagatatttgatatttaccatgaccacgcattgggagtgacccttgaccttaagacagaaaaaattatttccgatgatgttagggtaattactgtcaaagacttattgttcgatggcacttataaaggggtaaaatcttttatgcccgataatgcccgataatgcccgattgatgctacaaaatcccataatcataagcgataatcccctaatagcttgtaattcttgaaccgtagcgattttagagtattccaaaaagaagaaataaacaccgcaaaatgtcgtatttcacatatataaaccaaggttttttgccctaaaatctttatgtttgtagtgtgatgttgggtcaaaatggtcagaaaagttgcaaggtttttatggatgcttacgcgcgcgaggggtaagcatccccaaatagttactttatcctagtccatgcccatttattgccgtcccgttcggctttaaaaaagtgccaaaactcacaaggtgcaataaaaagttctgtacctttcgcaaccctagataatctttcaacagttactttttttcctattatctcggtacaaagtttggctagtttctcttttccctctttttcaatcaagccttcttgtatgcccaactcattgattaatctctctatttttaccattatttcccgttcaggtagtttatcccctaaatcttcatcggggggcaatgtagggcattctgaaggggctttttcttctgtctggacattatctaatattgaagtaaccaaactatcttcagttttttctattcctattaattcatattcggttactgtatccgtatcaatatccgaataactatctttatccgtattagctattcggttaagtttatccgttaactcagaaacaagactatatagcggttttagcttttcttctatcctgttatctaatacggataagtttatacggttatcattatccgtattagtatcattgggcttttttggtagttctaccccctcataaaccgcttttattcccaattccaacagactgataacagtatcctttataatgggttttttgctgatatggtgaacttttgccccttccatcattgcgatactttctatctcactcatcaacttatcgcttaagtgaatctcgtatctgtttaatcccttactggttttattcatatccgtttactttattcggttaacaattctattttatacgaataaaatattatacggttaactttatacgtttaactattttatctatacggataacagtaataagttattcgtattagttatacgtttacttttatccaaataaaattagtgcatttaaactaaaagaatgattttatcggagttgatagcattggattaacctaaagatgtttataagctatatctgataagtatttaaggttattttgttattctgtttattgacattatcagaataaaagaatagaatataattgttgagagataagaggtttaagtgattatggttaagaagttagttggttatgtcagggtcagtagtgaatcgcaagaggataacactagcttacagaatcagatagagagaattgaagcatattgtatggcttttggttatgagttggtaaaaatattcaaagaggttgccactggtacaaaagcagatattgaaacccgtcctatttttaatgaagctatagaatacttgaaacaggataatgctaatggaattattgccttgaagctagaccgaatcgcacggaatgctttagatgtattgcgtttggttcgtgaaaccttagaaccacaaaataaaatgttagtgttactagatattcaggtagatacttcgacaccttcaggaaaaatgattttaactgtaatgagtgccgttgctgaactcgaaagagacatgatctatgatcgcactcaggggggtagaaagactaaagcccaaaagggcgggtatgcctacgggaaacctaaatttggctataagactgaagaaaaggaactaaaagaagattcagcacaacaggaaactattaaactaattaagagacaccgtaggtcagggaaaagctaccagaaaatagctgattatctcaatgcccaaagtattcccactaaacaaggtaagaaatggagttctagcgtcgtctatcgaatctgtcaggaaaaagctggttaagtctgtttatagatatttagaatttattgaataaaaatagtatgaacaataaatatttatggactaaccacgctcggaaacgtttaactgaacgatgggaaataaaagaatcatgggttattgataccatcgaaaatcctgaacgttcagaatttattgttgatgagtcaggggaaaaatatcattactataaaagaatagctaagtttaagaatagagtgttagaagtgataacttctgccaactcaacacccacaagaataataaccttttactttaaccgtaacatgaggaaaaatttatgattgttacttacgataatgaagttgacgcaatttattttaagttaacggaaaataaaattgatagcaccgaacctcaaacagacaggattatcattgattacgatgaaagtaataatattgttggcattgaggtattagattttaattatcttgtcaagaaaggtttaaccgttgctgatttacctttttctgaagatgaaagattaacagcttctcaatattttaattttcctgttgctatctaatccagaaggggcaataatccccttctttcatcgagttagacttaatatcacaaaagtcattttcattttaccgtttcttttccacagcgtccgtacgcccctcgttaaatctcaaaaccgacaatttatgatgtttataaaaagttactcactttaataagtatttatactcattaaagggttattctttttttgtagcctgataggttgggaaggaatatttcagattatcagatttgttgaatatttttcgtcagatacgcaaaccttacaaacataattaacaactgaaactattgatatgtctaggttttagctctatcacaggttggatctg

SEQ ID NO: 75 - DNA, 12680 bp, Cyanobacterium sp. ABICyano1
tcgacaattaataacttcttcctgtacgggcgaatggccatttgctcctaactaactccgtactgctttgcggaacgagcgtagcgaactctccgaattactaagccttcatccctgatagatgcaaaaaacgaattaaaattatgtgtaaaaagaaaatgtgtctttatttagtagtcaaagttacaaaatattaagaatcaaattaataatgtattgggcagttaagtatataagtctttaaatatttatttgtattcaatatattaaccgaggacaaattatgaattcttataccgtgggtacttatttagccgaacgcttagtgcaaattggtttaaaacatcattttgccgtggctggggactataatttagtgttattggataacttattattaaataaaaacatggaacaagtgtattgttgtaatgaattaaattgtggtttttctgctgaaggttatgctagagctaaaggtgcagctgctgctgttgttacttattctgtgggtgctttatctgcttttgatgctattggtggtgcttatgccgaaaatttacccgtgattttaatttctggtgcccctaataataatgatcatgccgctggacatgttttacatcatgccttaggtaaaaccgattatcattatcaattagaaatggccaaaaatattactgctgctgccgaagctatttatactcctgaagaagcccctgccaaaattgatcatgtgattaaaaccgccttacgcgaaaaaaaacccgtgtatttagaaattgcctgtaatattgcttctatgccttgtgctgctcctgggcctgcttctgctttatttaatgatgaagcctctgatgaagctagtttaaatgctgccgtggaagaaaccttaaaatttattgccaatcgcgataaagttgccgtgttagttggttctaaattaagagctgctggtgctgaagaagctgctgttaaatttgctgatgctttaggtggtgcagttgctactatggctgctgccaaatctttttttcccgaagaaaatccccattatattggaactagttggggagaagtttcttatcctggtgtggaaaaaactatgaaagaagccgacgctgttattgctttagcccctgtgtttaatgattattctaccactggttggactgatattcccgatcccaaaaaattagttttagccgaacctcgttctgttgttgttaatggtgttcgctttccctctgtgcatttaaaagattatttaacccgcttagcccaaaaagtttctaaaaaaactggtgccttagatttttttaaatctttaaatgcgggtgaattaaaaaaagctgctcctgctgatccttctgctcctttagttaatgctgaaattgcccgtcaagttgaagccttattaacccctaatactaccgttattgccgaaactggtgattcttggtttaatgcccaacgcatgaaattacctaatggtgcccgtgttgaatatgaaatgcaatggggtcatattggttggtctgtacctgctgcttttggttatgctgttggtgctcctgaacgtcgtaatattttaatggtgggtgatggttcttttcaattaactgcccaagaagttgcccaaatggttcgcttaaaattacccgttattatttttttaataaataattatggttataccattgaagtgatgattcatgatgggccatataataatattaaaaattgggattatgcgggtttaatggaagtgtttaatggtaatggtggttatgattctggtgctggtaaaggtttaaaagccaaaactggtggtgaattagctgaagctattaaagttgccttagccaatactgatgggccaaccttaattgaatgttttattggtcgcgaagattgtaccgaagaattagttaaatggggtaaacgtgttgctgctgctaattctcgcaaacccgtgaataaattattgtaatttttggggatcaattcgagctcagcaagtttcatcccgaccccctcagggtcgggatttttttattgtactagttgacataagtaaaggcatcccctgcgtgatataattaccttcagtttaaggaggtatacacatatgagtgaaactaaatttaaagcctatgccgtaatgaatcctggtgaaaaattacaaccctgggaatatgaacctgctcctttacaggtagatgaaattgaagtaagagttactcacaatggtttatgtcacactgacttacacatgagagataatgactggaatgttagtgagttccccttagtagcaggtcatgaagttgttggtgaagtaaccgctgttggtgaaaaagtaaccagtcgtaaaaaaggtgatagagttggtgtaggttggattcgtaattcttgtcgcgcttgtgaccattgtttacaaggagaagagaacatttgtagagagggttatactggtttaattgttggtcatcacggtggatttgctgatcgtgtacgtgtacctgctgacttcacttataaaattcctgatgctttagatagtgcatctgctgctcctttattatgtgccggtattaccgtttacactcctttaagaacctacattaaacatcccggtatgaaagtaggtgttatgggtattggaggattaggacatttagctattaaatttgctcgtgcaatgggagcagaagttactgcctttagtaccagtcctaataaagaagcccaagccaaagaatttggtgctcatcatttccaacaatggggtactgctgaagaaatgaaagctgttgccggtaattttgatttagttttatctaccatctctgctgaaactgactgggatgctgccttctctttattagcaaataacggtgttttatgtttcgtaggtattcccgttagttctttaaatgttcctttaattcctttaattttcggacaaaaatctgttgtaggttctgtagttggaggaagaagattcatggcagaaatgttagagttcgccgctgtaaatcagattaaacctatgatcgaaactatgcccttatctcaagtaaatgaagctatggataaagttgccgccaataaagccagatatagaattgtattattatctgaataactagatctcctgcagagaatataaaaagccagattattaatccggcttttttattatttaaatactgtgcacgatcctgcaggatcatcttgctgaaaaactcgagcgctcgttccgcaaagcggtacggagttagttaggggctaatgggcattctcccgtacaggaaagagttagaagttattaattatcaacaattctcctttgcctagtgcatcgttacctttttaattaaaacataaggaaaactaataatcgtaataatttaacctcaaagtgtaaagaaatgtgaaattctgacttttataacgttaaagagggaaaaattagcagtttaaaatacctagagaatagtctggggtaagcatagagaattagattagttaagttaatcaaattcagaaaaaataataatcgtaaatagttaatctgggtgtatagaaaatgatccccttcatgataagatttaaactcgaaaagcaaaagccaaaaaactaacttccattaaaagaagttgttacatataacgctataaagaaaatttatatatttggaggataccaaccatgtctcatattcaacgtgaaactagttgttctcgccctcgtttaaattctaatatggatgccgatttatatggttataaatgggctcgtgataatgttggtcaatctggtgctactatttatcgtttatatggtaaacctgatgctcctgaattattcttgaaacatggtaaaggttctgttgctaatgatgttactgatgaaatggttcgtttaaactggttgactgaatttatgcctttacctactattaaacattttattcgtactcccgatgatgcttggttattaactactgctattcctggtaaaactgcttttcaagttttagaagaatatcctgattctggtgaaaatattgttgatgctttagctgtttttttacgtcgtttacattctattcccgtttgtaattgtccttttaattctgatcgtgtttttcgtttagctcaagctcaatctcgtatgaataatggtttagttgatgcttctgattttgatgatgaacgtaatggttggcctgttgaacaagtttggaaagaaatgcacaaattgttacctttttctcctgattctgttgttactcatggtgatttttctttagataatttgatctttgatgaaggtaaattgattggttgtattgatgttggtcgtgttggtattgctgatcgttatcaagatttagctattttatggaattgtttaggtgaattttctccttctttacagaaacgtttatttcagaaatatggtattgataatcctgatatgaacaagttacaatttcatttaatgttggacgagttcttttaagaattaattcatgaccaaaatcccttaacgtgagttttcgttccactgagcgtcagaccccgtagaaaagatcaaaggatcttcttgagatcctttttttctgcgcgtaatctgctgctatttaaattacgtacacgtgttattactttgttaacgacaattgtcttaattaactgggcctcatgggccttccgctcactgcccgctttccagtcgggaaacctgtcgtgccagctctgcagatgacggtgaaaacctctgacacatgcagctcccggagacggtcacagcttgtctgtaagcggatgccgggagcagacaagcccgtcagggcgcgtcagcgggtgttggcgggtgtcggggcgcagccatgacccagtcacgtagcgatagcggagtgtatactggcttaactatgcggcatcagagcagattgtactgagagtgcaccatatgcggtgtgaaataccgcacagatgcgtaaggagaaaataccgcatcaggcgctcttccgcttcctcgctcactgactcgctgcgctcggtcgttcggctgcggcgagcggtatcagctcactcaaaggcggtaatacggttatccacagaatcaggggataacgcaggaaagaacatgtgagcaaaaggccagcaaaaggccaggaaccgtaaaaaggccgcgttgctggcgtttttccataggctccgcccccctgacgagcatcacaaaaatcgacgctcaagtcagaggtggcgaaacccgacaggactataaagataccaggcgtttccccctggaagctccctcgtgcgctctcctgttccgaccctgccgcttaccggatacctgtccgcctttctcccttcgggaagcgtggcgctttctcatagctcacgctgtaggtatctcagttcggtgtaggtcgttcgctccaagctgggctgtgtgcacgaaccccccgttcagcccgaccgctgcgccttatccggtaactatcgtcttgagtccaacccggtaagacacgacttatcgccactggcagcagccactggtaacaggattagcagagcgaggtatgtaggcggtgctacagagttcttgaagtggtggcctaactacggctacactagaaggacagtatttggtatctgcgctctgctgaagccagttaccttcggaaaaagagttggtagctcttgatccggcaaacaaaccaccgctggtagcggtggtttttttgtttgcaagcagcagattacgcgcagaaaaaaaggatctcaagaagatcctttgatcttttctactgcagaagcttgttagacaccctgtcatgtattttatattatttatttcaccatacggattaagtgaaacctaatgaaaatagtactttcggagctttaactttaatgaaggtatgtttttttatagacatcgatgtctggtttaacaataggaaaaagtagctaaaactcccatgaattaaagaaataacaaggtgtctaacaacctgttattaagaatgttagaaaagacttaacatttgtgttgagtttttatagacattggtgtctagacatacggtagataaggtttgctcaaaaataaaataaaaaaagattggactaaaaaacatttaatttagtacaatttaattagttattttttcgtctcaaattttgctttgttgagcagaaatttagataaaaaaatccccgtgatcagattacaatgtcgttcattgtacgatgtgtcgaaaaatctttacgacactctaaactgaccacacgggggaaaaagaaaactgaactaataacatcatgatactcggaaaacctagcaattctcaacccctaaacaaaagaaacttccaaaaccctgaccatataaaggagtggcaacaatcagcaatcagtcaagatttgatagcagaaaatcttgtatcggttgctaatggttttgatgtactatttatcggcaataaataccgaactaacacgggtgttctgtcacggcacatattaaactcctattctcatttagaagatggtggttcgtatggtagaacatttgacccatttaccaataaagaaatgcagtgggttcaatttaaaccgaatagaccaagaaaaggttctactggtaaggtaatcaaatatgaatcgccaaaaggtgaacctacaagagttctaatgccgtttgtgcctatgaaaatatggcaacggattagcgataagttcggagtaccgattaatccgaaaaaagatactcacttttgggaatgggtaaagaataatccatcgataccgattgccattacagaaggaaataaaaaagctaattgcctattatcctatggctatcctgctattgcctttgtaggcatttggaacggattagagaaaataaatgatttctcgaaggaaaagcagttaaaagaggatttgaaatggttgttatccaacggcaaccgaaatattaatatcatctttgaccaagaccagaaacaaaaaactgtaattaatgtaaacaaagctattttcgctttatcttctctaataagtagaaatggtcataaagttaatattgtgcaatggttgccgtcaaaaggtaaaggaatagatgattatttggtagctttaccttttgagaaaagagaaaatcatttagacaacttaattaaaattgcaccatcatttaatttttggtcaactaaatacttattcaagtgtcgtaaaccagatttaaccgtaaattgccgttatttgagcgatgcagtaaaagaattacctcaagaggatatagcattaatagcacctcacggcacgggtaaaacttcattagtagctactcacgttaagaatcggagttatcacggaaggaaaactatttcattggtgcatcttgaaagtttagccaaagctaatggcaacgcacttggattatattaccgaaccgaaaataatattgaaaagcaatatcttggatttagcttatgtgtagatagttgccgtgataagattaacggcattacaactgatattatttcaggtcaagattattgccttttcattgatgaaattgaccaagtaattccacacatccttaacagtgaaactgaagtaagtaagtatagatgcaccatcattgacactttttctgaactggtgagaaatgctgaacaggtcattattgctgatgctgatttatccgatgtgacgattgacctaatagaaaacatcagaggtaaaaaactatatgtaatcaagaatgaatatcagtatcagggaatgacttttaacgccgttggttcaccattagaaatgatggcaatgatgggaaaatcggtgtcagaaggcaagaaattatttattaacaccacatcccaaaaggcaaaaagtaagtacggcacaatcgctcttgagtcttatatttttggtctaaataaagaagcaaagatattaagaatagactctgaaaccactaaaaaccctgaacatccagcctataaaatcattgaccaagacttaaataatatcctcaaagattatgattatgtcattgcctcaccttgccttcaaacaggtgtcagtattaccttaaaagggcattttgaccagcaatttaacttttccagtggaaacattacacctcattgctttttacagcaaatgtggcggttgagggatgcagaaattgaaagattctattatgtgccgaactcatctaacctcaatctcattgggaataagtcaagttcaccatcagaccttctaaagagcaataacaagatggcaacggcaacggttaaccttttgggtagaatcgactccgaatattccctagagtatgaatcgcacggcatttggcttgagacgtgggcaaaattatcagcacggcataacagttcaatgcgttgttactctgaaattcttacctatctaattacgtctcaagggcataaattaaatatcaacattccctcacctcttgcagatattaagaagctaaatgatgaggtaagtagtaacagggaaaaggtaaaaaatgagagatactctcagaggttaaactcaccagatattaacgatgcagaagctaccatactcgaatctaaagagcaaaaaatcggattgactctcaatgagagatgcaccctagaaaagcataaagttaagaagcggtatgggaatgtaaagatggatattctcacctttgatgatgatggactataccccaaactcagactattttattacctcaccatcggtaaacctcatctcaaggctaatgacagaaaagctattgccaaaatgggcaatgacaataaaggcaagattctatcaaaagacttagttaataaaacttactccgctcgtgtgaaggtcttagagattcttaaactaactgactttatcgacaatcttagagatgaactcttaataactcccaataatccagctatcaccgattttaataatcttctgctaagagctaagaaggatttaagagtattaggagtcaacatcggaaaatatccaatggccaacattaatgccgtacttactctcattggtcacaaactttctgtaatgagagatgagttcggaaaagagaaaaggataaaagtagatggtaaatcataccgatgttatcaacttgaaacattaccagattttaccaatgatactcttgactactggttagaaaatgatagccaaaaagaagtaacagcaacagaaaattactccgaaaattttaacccttcaaatagctacaatccagacagtaagacactttcagagggtgcaaatttcctatatataaataaagaagaattgcatccaaataaattgcacctagaaataaaagaaggtgctgaactttttttattcggggtaaaggtgattgtgaaaggaatcttggacggggcagtaactatattctctatgggtcaagaatacgatttatccctcaatgaactagaggggatgttaacatcatgaactttacaagaatctttttaaagggcgatcgcaccatgttaaatgatggtacatttgttcagatatttgatatttaccatgaccacgcattgggagtgacccttgaccttaagacagaaaaaattatttccgatgatgttagggtaattactgtcaaagacttattgttcgatggcacttataaaggggtaaaatcttttatgcccgataatgcccgataatgcccgattgatgctacaaaatcccataatcataagcgataatcccctaatagcttgtaattcttgaaccgtagcgattttagagtattccaaaaagaagaaataaacaccgcaaaatgtcgtatttcacatatataaaccaaggttttttgccctaaaatctttatgtttgtagtgtgatgttgggtcaaaatggtcagaaaagttgcaaggtttttatggatgcttacgcgcgcgaggggtaagcatccccaaatagttactttatcctagtccatgcccatttattgccgtcccgttcggctttaaaaaagtgccaaaactcacaaggtgcaataaaaagttctgtacctttcgcaaccctagataatctttcaacagttactttttttcctattatctcggtacaaagtttggctagtttctcttttccctctttttcaatcaagccttcttgtatgcccaactcattgattaatctctctatttttaccattatttcccgttcaggtagtttatcccctaaatcttcatcggggggcaatgtagggcattctgaaggggctttttcttctgtctggacattatctaatattgaagtaaccaaactatcttcagttttttctattcctattaattcatattcggttactgtatccgtatcaatatccgaataactatctttatccgtattagctattcggttaagtttatccgttaactcagaaacaagactatatagcggttttagcttttcttctatcctgttatctaatacggataagtttatacggttatcattatccgtattagtatcattgggcttttttggtagttctaccccctcataaaccgcttttattcccaattccaacagactgataacagtatcctttataatgggttttttgctgatatggtgaacttttgccccttccatcattgcgatactttctatctcactcatcaacttatcgcttaagtgaatctcgtatctgtttaatcccttactggttttattcatatccgtttactttattcggttaacaattctattttatacgaataaaatattatacggttaactttatacgtttaactattttatctatacggataacagtaataagttattcgtattagttatacgtttacttttatccaaataaaattagtgcatttaaactaaaagaatgattttatcggagttgatagcattggattaacctaaagatgtttataagctatatctgataagtatttaaggttattttgttattctgtttattgacattatcagaataaaagaatagaatataattgttgagagataagaggtttaagtgattatggttaagaagttagttggttatgtcagggtcagtagtgaatcgcaagaggataacactagcttacagaatcagatagagagaattgaagcatattgtatggcttttggttatgagttggtaaaaatattcaaagaggttgccactggtacaaaagcagatattgaaacccgtcctatttttaatgaagctatagaatacttgaaacaggataatgctaatggaattattgccttgaagctagaccgaatcgcacggaatgctttagatgtattgcgtttggttcgtgaaaccttagaaccacaaaataaaatgttagtgttactagatattcaggtagatacttcgacaccttcaggaaaaatgattttaactgtaatgagtgccgttgctgaactcgaaagagacatgatctatgatcgcactcaggggggtagaaagactaaagcccaaaagggcgggtatgcctacgggaaacctaaatttggctataagactgaagaaaaggaactaaaagaagattcagcacaacaggaaactattaaactaattaagagacaccgtaggtcagggaaaagctaccagaaaatagctgattatctcaatgcccaaagtattcccactaaacaaggtaagaaatggagttctagcgtcgtctatcgaatctgtcaggaaaaagctggttaagtctgtttatagatatttagaatttattgaataaaaatagtatgaacaataaatatttatggactaaccacgctcggaaacgtttaactgaacgatgggaaataaaagaatcatgggttattgataccatcgaaaatcctgaacgttcagaatttattgttgatgagtcaggggaaaaatatcattactataaaagaatagctaagtttaagaatagagtgttagaagtgataacttctgccaactcaacacccacaagaataataaccttttactttaaccgtaacatgaggaaaaatttatgattgttacttacgataatgaagttgacgcaatttattttaagttaacggaaaataaaattgatagcaccgaacctcaaacagacaggattatcattgattacgatgaaagtaataatattgttggcattgaggtattagattttaattatcttgtcaagaaaggtttaaccgttgctgatttacctttttctgaagatgaaagattaacagcttctcaatattttaattttcctgttgctatctaatccagaaggggcaataatccccttctttcatcgagttagacttaatatcacaaaagtcattttcattttaccgtttcttttccacagcgtccgtacgcccctcgttaaatctcaaaaccgacaatttatgatgtttataaaaagttactcactttaataagtatttatactcattaaagggttattctttttttgtagcctgataggttgggaaggaatatttcagattatcagatttgttgaatatttttcgtcagatacgcaaaccttacaaacataattaacaactgaaactattgatatgtctaggttttagctctatcacaggttggatctg

SEQ ID NO: 76 - DNA, 12525 bp, Cyanobacterium sp. ABICyano1
tcgacaattttatggttgtttgtaaaatatattaacaaatgaacaataattcatttgttgtgttaatctaattattagacaattactgaatttatattcagtaattcacagataggaggatcagccatatgaattcttataccgtgggtacttatttagccgaacgcttagtgcaaattggtttaaaacatcattttgccgtggctggggactataatttagtgttattggataacttattattaaataaaaacatggaacaagtgtattgttgtaatgaattaaattgtggtttttctgctgaaggttatgctagagctaaaggtgcagctgctgctgttgttacttattctgtgggtgctttatctgcttttgatgctattggtggtgcttatgccgaaaatttacccgtgattttaatttctggtgcccctaataataatgatcatgccgctggacatgttttacatcatgccttaggtaaaaccgattatcattatcaattagaaatggccaaaaatattactgctgctgccgaagctatttatactcctgaagaagcccctgccaaaattgatcatgtgattaaaaccgccttacgcgaaaaaaaacccgtgtatttagaaattgcctgtaatattgcttctatgccttgtgctgctcctgggcctgcttctgctttatttaatgatgaagcctctgatgaagctagtttaaatgctgccgtggaagaaaccttaaaatttattgccaatcgcgataaagttgccgtgttagttggttctaaattaagagctgctggtgctgaagaagctgctgttaaatttgctgatgctttaggtggtgcagttgctactatggctgctgccaaatctttttttcccgaagaaaatccccattatattggaactagttggggagaagtttcttatcctggtgtggaaaaaactatgaaagaagccgacgctgttattgctttagcccctgtgtttaatgattattctaccactggttggactgatattcccgatcccaaaaaattagttttagccgaacctcgttctgttgttgttaatggtgttcgctttccctctgtgcatttaaaagattatttaacccgcttagcccaaaaagtttctaaaaaaactggtgccttagatttttttaaatctttaaatgcgggtgaattaaaaaaagctgctcctgctgatccttctgctcctttagttaatgctgaaattgcccgtcaagttgaagccttattaacccctaatactaccgttattgccgaaactggtgattcttggtttaatgcccaacgcatgaaattacctaatggtgcccgtgttgaatatgaaatgcaatggggtcatattggttggtctgtacctgctgcttttggttatgctgttggtgctcctgaacgtcgtaatattttaatggtgggtgatggttcttttcaattaactgcccaagaagttgcccaaatggttcgcttaaaattacccgttattatttttttaataaataattatggttataccattgaagtgatgattcatgatgggccatataataatattaaaaattgggattatgcgggtttaatggaagtgtttaatggtaatggtggttatgattctggtgctggtaaaggtttaaaagccaaaactggtggtgaattagctgaagctattaaagttgccttagccaatactgatgggccaaccttaattgaatgttttattggtcgcgaagattgtaccgaagaattagttaaatggggtaaacgtgttgctgctgctaattctcgcaaacccgtgaataaattattgtaatttttggggatcaattcgagctcagcaagtttcatcccgaccccctcagggtcgggatttttttattgtactagttgacataagtaaaggcatcccctgcgtgatataattaccttcagtttaaggaggtatacacatatgagtgaaactaaatttaaagcctatgccgtaatgaatcctggtgaaaaattacaaccctgggaatatgaacctgctcctttacaggtagatgaaattgaagtaagagttactcacaatggtttatgtcacactgacttacacatgagagataatgactggaatgttagtgagttccccttagtagcaggtcatgaagttgttggtgaagtaaccgctgttggtgaaaaagtaaccagtcgtaaaaaaggtgatagagttggtgtaggttggattcgtaattcttgtcgcgcttgtgaccattgtttacaaggagaagagaacatttgtagagagggttatactggtttaattgttggtcatcacggtggatttgctgatcgtgtacgtgtacctgctgacttcacttataaaattcctgatgctttagatagtgcatctgctgctcctttattatgtgccggtattaccgtttacactcctttaagaacctacattaaacatcccggtatgaaagtaggtgttatgggtattggaggattaggacatttagctattaaatttgctcgtgcaatgggagcagaagttactgcctttagtaccagtcctaataaagaagcccaagccaaagaatttggtgctcatcatttccaacaatggggtactgctgaagaaatgaaagctgttgccggtaattttgatttagttttatctaccatctctgctgaaactgactgggatgctgccttctctttattagcaaataacggtgttttatgtttcgtaggtattcccgttagttctttaaatgttcctttaattcctttaattttcggacaaaaatctgttgtaggttctgtagttggaggaagaagattcatggcagaaatgttagagttcgccgctgtaaatcagattaaacctatgatcgaaactatgcccttatctcaagtaaatgaagctatggataaagttgccgccaataaagccagatatagaattgtattattatctgaataactagatctcctgcagagaatataaaaagccagattattaatccggcttttttattatttaaatactgtgcacgatcctgcaggatcatcttgctgaaaaactcgagcgctcgttccgcaaagcggtacggagttagttaggggctaatgggcattctcccgtacaggaaagagttagaagttattaattatcaacaattctcctttgcctagtgcatcgttacctttttaattaaaacataaggaaaactaataatcgtaataatttaacctcaaagtgtaaagaaatgtgaaattctgacttttataacgttaaagagggaaaaattagcagtttaaaatacctagagaatagtctggggtaagcatagagaattagattagttaagttaatcaaattcagaaaaaataataatcgtaaatagttaatctgggtgtatagaaaatgatccccttcatgataagatttaaactcgaaaagcaaaagccaaaaaactaacttccattaaaagaagttgttacatataacgctataaagaaaatttatatatttggaggataccaaccatgtctcatattcaacgtgaaactagttgttctcgccctcgtttaaattctaatatggatgccgatttatatggttataaatgggctcgtgataatgttggtcaatctggtgctactatttatcgtttatatggtaaacctgatgctcctgaattattcttgaaacatggtaaaggttctgttgctaatgatgttactgatgaaatggttcgtttaaactggttgactgaatttatgcctttacctactattaaacattttattcgtactcccgatgatgcttggttattaactactgctattcctggtaaaactgcttttcaagttttagaagaatatcctgattctggtgaaaatattgttgatgctttagctgtttttttacgtcgtttacattctattcccgtttgtaattgtccttttaattctgatcgtgtttttcgtttagctcaagctcaatctcgtatgaataatggtttagttgatgcttctgattttgatgatgaacgtaatggttggcctgttgaacaagtttggaaagaaatgcacaaattgttacctttttctcctgattctgttgttactcatggtgatttttctttagataatttgatctttgatgaaggtaaattgattggttgtattgatgttggtcgtgttggtattgctgatcgttatcaagatttagctattttatggaattgtttaggtgaattttctccttctttacagaaacgtttatttcagaaatatggtattgataatcctgatatgaacaagttacaatttcatttaatgttggacgagttcttttaagaattaattcatgaccaaaatcccttaacgtgagttttcgttccactgagcgtcagaccccgtagaaaagatcaaaggatcttcttgagatcctttttttctgcgcgtaatctgctgctatttaaattacgtacacgtgttattactttgttaacgacaattgtcttaattaactgggcctcatgggccttccgctcactgcccgctttccagtcgggaaacctgtcgtgccagctctgcagatgacggtgaaaacctctgacacatgcagctcccggagacggtcacagcttgtctgtaagcggatgccgggagcagacaagcccgtcagggcgcgtcagcgggtgttggcgggtgtcggggcgcagccatgacccagtcacgtagcgatagcggagtgtatactggcttaactatgcggcatcagagcagattgtactgagagtgcaccatatgcggtgtgaaataccgcacagatgcgtaaggagaaaataccgcatcaggcgctcttccgcttcctcgctcactgactcgctgcgctcggtcgttcggctgcggcgagcggtatcagctcactcaaaggcggtaatacggttatccacagaatcaggggataacgcaggaaagaacatgtgagcaaaaggccagcaaaaggccaggaaccgtaaaaaggccgcgttgctggcgtttttccataggctccgcccccctgacgagcatcacaaaaatcgacgctcaagtcagaggtggcgaaacccgacaggactataaagataccaggcgtttccccctggaagctccctcgtgcgctctcctgttccgaccctgccgcttaccggatacctgtccgcctttctcccttcgggaagcgtggcgctttctcatagctcacgctgtaggtatctcagttcggtgtaggtcgttcgctccaagctgggctgtgtgcacgaaccccccgttcagcccgaccgctgcgccttatccggtaactatcgtcttgagtccaacccggtaagacacgacttatcgccactggcagcagccactggtaacaggattagcagagcgaggtatgtaggcggtgctacagagttcttgaagtggtggcctaactacggctacactagaaggacagtatttggtatctgcgctctgctgaagccagttaccttcggaaaaagagttggtagctcttgatccggcaaacaaaccaccgctggtagcggtggtttttttgtttgcaagcagcagattacgcgcagaaaaaaaggatctcaagaagatcctttgatcttttctactgcagaagcttgttagacaccctgtcatgtattttatattatttatttcaccatacggattaagtgaaacctaatgaaaatagtactttcggagctttaactttaatgaaggtatgtttttttatagacatcgatgtctggtttaacaataggaaaaagtagctaaaactcccatgaattaaagaaataacaaggtgtctaacaacctgttattaagaatgttagaaaagacttaacatttgtgttgagtttttatagacattggtgtctagacatacggtagataaggtttgctcaaaaataaaataaaaaaagattggactaaaaaacatttaatttagtacaatttaattagttattttttcgtctcaaattttgctttgttgagcagaaatttagataaaaaaatccccgtgatcagattacaatgtcgttcattgtacgatgtgtcgaaaaatctttacgacactctaaactgaccacacgggggaaaaagaaaactgaactaataacatcatgatactcggaaaacctagcaattctcaacccctaaacaaaagaaacttccaaaaccctgaccatataaaggagtggcaacaatcagcaatcagtcaagatttgatagcagaaaatcttgtatcggttgctaatggttttgatgtactatttatcggcaataaataccgaactaacacgggtgttctgtcacggcacatattaaactcctattctcatttagaagatggtggttcgtatggtagaacatttgacccatttaccaataaagaaatgcagtgggttcaatttaaaccgaatagaccaagaaaaggttctactggtaaggtaatcaaatatgaatcgccaaaaggtgaacctacaagagttctaatgccgtttgtgcctatgaaaatatggcaacggattagcgataagttcggagtaccgattaatccgaaaaaagatactcacttttgggaatgggtaaagaataatccatcgataccgattgccattacagaaggaaataaaaaagctaattgcctattatcctatggctatcctgctattgcctttgtaggcatttggaacggattagagaaaataaatgatttctcgaaggaaaagcagttaaaagaggatttgaaatggttgttatccaacggcaaccgaaatattaatatcatctttgaccaagaccagaaacaaaaaactgtaattaatgtaaacaaagctattttcgctttatcttctctaataagtagaaatggtcataaagttaatattgtgcaatggttgccgtcaaaaggtaaaggaatagatgattatttggtagctttaccttttgagaaaagagaaaatcatttagacaacttaattaaaattgcaccatcatttaatttttggtcaactaaatacttattcaagtgtcgtaaaccagatttaaccgtaaattgccgttatttgagcgatgcagtaaaagaattacctcaagaggatatagcattaatagcacctcacggcacgggtaaaacttcattagtagctactcacgttaagaatcggagttatcacggaaggaaaactatttcattggtgcatcttgaaagtttagccaaagctaatggcaacgcacttggattatattaccgaaccgaaaataatattgaaaagcaatatcttggatttagcttatgtgtagatagttgccgtgataagattaacggcattacaactgatattatttcaggtcaagattattgccttttcattgatgaaattgaccaagtaattccacacatccttaacagtgaaactgaagtaagtaagtatagatgcaccatcattgacactttttctgaactggtgagaaatgctgaacaggtcattattgctgatgctgatttatccgatgtgacgattgacctaatagaaaacatcagaggtaaaaaactatatgtaatcaagaatgaatatcagtatcagggaatgacttttaacgccgttggttcaccattagaaatgatggcaatgatgggaaaatcggtgtcagaaggcaagaaattatttattaacaccacatcccaaaaggcaaaaagtaagtacggcacaatcgctcttgagtcttatatttttggtctaaataaagaagcaaagatattaagaatagactctgaaaccactaaaaaccctgaacatccagcctataaaatcattgaccaagacttaaataatatcctcaaagattatgattatgtcattgcctcaccttgccttcaaacaggtgtcagtattaccttaaaagggcattttgaccagcaatttaacttttccagtggaaacattacacctcattgctttttacagcaaatgtggcggttgagggatgcagaaattgaaagattctattatgtgccgaactcatctaacctcaatctcattgggaataagtcaagttcaccatcagaccttctaaagagcaataacaagatggcaacggcaacggttaaccttttgggtagaatcgactccgaatattccctagagtatgaatcgcacggcatttggcttgagacgtgggcaaaattatcagcacggcataacagttcaatgcgttgttactctgaaattcttacctatctaattacgtctcaagggcataaattaaatatcaacattccctcacctcttgcagatattaagaagctaaatgatgaggtaagtagtaacagggaaaaggtaaaaaatgagagatactctcagaggttaaactcaccagatattaacgatgcagaagctaccatactcgaatctaaagagcaaaaaatcggattgactctcaatgagagatgcaccctagaaaagcataaagttaagaagcggtatgggaatgtaaagatggatattctcacctttgatgatgatggactataccccaaactcagactattttattacctcaccatcggtaaacctcatctcaaggctaatgacagaaaagctattgccaaaatgggcaatgacaataaaggcaagattctatcaaaagacttagttaataaaacttactccgctcgtgtgaaggtcttagagattcttaaactaactgactttatcgacaatcttagagatgaactcttaataactcccaataatccagctatcaccgattttaataatcttctgctaagagctaagaaggatttaagagtattaggagtcaacatcggaaaatatccaatggccaacattaatgccgtacttactctcattggtcacaaactttctgtaatgagagatgagttcggaaaagagaaaaggataaaagtagatggtaaatcataccgatgttatcaacttgaaacattaccagattttaccaatgatactcttgactactggttagaaaatgatagccaaaaagaagtaacagcaacagaaaattactccgaaaattttaacccttcaaatagctacaatccagacagtaagacactttcagagggtgcaaatttcctatatataaataaagaagaattgcatccaaataaattgcacctagaaataaaagaaggtgctgaactttttttattcggggtaaaggtgattgtgaaaggaatcttggacggggcagtaactatattctctatgggtcaagaatacgatttatccctcaatgaactagaggggatgttaacatcatgaactttacaagaatctttttaaagggcgatcgcaccatgttaaatgatggtacatttgttcagatatttgatatttaccatgaccacgcattgggagtgacccttgaccttaagacagaaaaaattatttccgatgatgttagggtaattactgtcaaagacttattgttcgatggcacttataaaggggtaaaatcttttatgcccgataatgcccgataatgcccgattgatgctacaaaatcccataatcataagcgataatcccctaatagcttgtaattcttgaaccgtagcgattttagagtattccaaaaagaagaaataaacaccgcaaaatgtcgtatttcacatatataaaccaaggttttttgccctaaaatctttatgtttgtagtgtgatgttgggtcaaaatggtcagaaaagttgcaaggtttttatggatgcttacgcgcgcgaggggtaagcatccccaaatagttactttatcctagtccatgcccatttattgccgtcccgttcggctttaaaaaagtgccaaaactcacaaggtgcaataaaaagttctgtacctttcgcaaccctagataatctttcaacagttactttttttcctattatctcggtacaaagtttggctagtttctcttttccctctttttcaatcaagccttcttgtatgcccaactcattgattaatctctctatttttaccattatttcccgttcaggtagtttatcccctaaatcttcatcggggggcaatgtagggcattctgaaggggctttttcttctgtctggacattatctaatattgaagtaaccaaactatcttcagttttttctattcctattaattcatattcggttactgtatccgtatcaatatccgaataactatctttatccgtattagctattcggttaagtttatccgttaactcagaaacaagactatatagcggttttagcttttcttctatcctgttatctaatacggataagtttatacggttatcattatccgtattagtatcattgggcttttttggtagttctaccccctcataaaccgcttttattcccaattccaacagactgataacagtatcctttataatgggttttttgctgatatggtgaacttttgccccttccatcattgcgatactttctatctcactcatcaacttatcgcttaagtgaatctcgtatctgtttaatcccttactggttttattcatatccgtttactttattcggttaacaattctattttatacgaataaaatattatacggttaactttatacgtttaactattttatctatacggataacagtaataagttattcgtattagttatacgtttacttttatccaaataaaattagtgcatttaaactaaaagaatgattttatcggagttgatagcattggattaacctaaagatgtttataagctatatctgataagtatttaaggttattttgttattctgtttattgacattatcagaataaaagaatagaatataattgttgagagataagaggtttaagtgattatggttaagaagttagttggttatgtcagggtcagtagtgaatcgcaagaggataacactagcttacagaatcagatagagagaattgaagcatattgtatggcttttggttatgagttggtaaaaatattcaaagaggttgccactggtacaaaagcagatattgaaacccgtcctatttttaatgaagctatagaatacttgaaacaggataatgctaatggaattattgccttgaagctagaccgaatcgcacggaatgctttagatgtattgcgtttggttcgtgaaaccttagaaccacaaaataaaatgttagtgttactagatattcaggtagatacttcgacaccttcaggaaaaatgattttaactgtaatgagtgccgttgctgaactcgaaagagacatgatctatgatcgcactcaggggggtagaaagactaaagcccaaaagggcgggtatgcctacgggaaacctaaatttggctataagactgaagaaaaggaactaaaagaagattcagcacaacaggaaactattaaactaattaagagacaccgtaggtcagggaaaagctaccagaaaatagctgattatctcaatgcccaaagtattcccactaaacaaggtaagaaatggagttctagcgtcgtctatcgaatctgtcaggaaaaagctggttaagtctgtttatagatatttagaatttattgaataaaaatagtatgaacaataaatatttatggactaaccacgctcggaaacgtttaactgaacgatgggaaataaaagaatcatgggttattgataccatcgaaaatcctgaacgttcagaatttattgttgatgagtcaggggaaaaatatcattactataaaagaatagctaagtttaagaatagagtgttagaagtgataacttctgccaactcaacacccacaagaataataaccttttactttaaccgtaacatgaggaaaaatttatgattgttacttacgataatgaagttgacgcaatttattttaagttaacggaaaataaaattgatagcaccgaacctcaaacagacaggattatcattgattacgatgaaagtaataatattgttggcattgaggtattagattttaattatcttgtcaagaaaggtttaaccgttgctgatttacctttttctgaagatgaaagattaacagcttctcaatattttaattttcctgttgctatctaatccagaaggggcaataatccccttctttcatcgagttagacttaatatcacaaaagtcattttcattttaccgtttcttttccacagcgtccgtacgcccctcgttaaatctcaaaaccgacaatttatgatgtttataaaaagttactcactttaataagtatttatactcattaaagggttattctttttttgtagcctgataggttgggaaggaatatttcagattatcagatttgttgaatatttttcgtcagatacgcaaaccttacaaacataattaacaactgaaactattgatatgtctaggttttagctctatcacaggttggatctg

SEQ ID NO: 77 - DNA, 12678 bp, Cyanobacterium sp. ABICyano1
tcgacaattaataacttcttcctgtacgggcgaatggccatttgctcctaactaactccgtactgctttgcggaacgagcgtagcgaactctccgaattactaagccttcatccctgatagatgcaaaaaacgaattaaaattatgtgtaaaaagaaaatgtgtctttatttagtagtcaaagttacaaaatattaagaatcaaattaataatgtattgggcagttaagtatataagtctttaaatatttatttgtattcaatatattaaccgaggacaaattatgaattcttataccgtgggtacttatttagccgaacgcttagtgcaaattggtttaaaacatcattttgccgtggctggggactataatttagtgttattggataacttattattaaataaaaacatggaacaagtgtattgttgtaatgaattaaattgtggtttttctgctgaaggttatgctagagctaaaggtgcagctgctgctgttgttacttattctgtgggtgctttatctgcttttgatgctattggtggtgcttatgccgaaaatttacccgtgattttaatttctggtgcccctaataataatgatcatgccgctggacatgttttacatcatgccttaggtaaaaccgattatcattatcaattagaaatggccaaaaatattactgctgctgccgaagctatttatactcctgaagaagcccctgccaaaattgatcatgtgattaaaaccgccttacgcgaaaaaaaacccgtgtatttagaaattgcctgtaatattgcttctatgccttgtgctgctcctgggcctgcttctgctttatttaatgatgaagcctctgatgaagctagtttaaatgctgccgtggaagaaaccttaaaatttattgccaatcgcgataaagttgccgtgttagttggttctaaattaagagctgctggtgctgaagaagctgctgttaaatttgctgatgctttaggtggtgcagttgctactatggctgctgccaaatctttttttcccgaagaaaatccccattatattggaactagttggggagaagtttcttatcctggtgtggaaaaaactatgaaagaagccgacgctgttattgctttagcccctgtgtttaatgattattctaccactggttggactgatattcccgatcccaaaaaattagttttagccgaacctcgttctgttgttgttaatggtgttcgctttccctctgtgcatttaaaagattatttaacccgcttagcccaaaaagtttctaaaaaaactggtgccttagatttttttaaatctttaaatgcgggtgaattaaaaaaagctgctcctgctgatccttctgctcctttagttaatgctgaaattgcccgtcaagttgaagccttattaacccctaatactaccgttattgccgaaactggtgattcttggtttaatgcccaacgcatgaaattacctaatggtgcccgtgttgaatatgaaatgcaatggggtcatattggttggtctgtacctgctgcttttggttatgctgttggtgctcctgaacgtcgtaatattttaatggtgggtgatggttcttttcaattaactgcccaagaagttgcccaaatggttcgcttaaaattacccgttattatttttttaataaataattatggttataccattgaagtgatgattcatgatgggccatataataatattaaaaattgggattatgcgggtttaatggaagtgtttaatggtaatggtggttatgattctggtgctggtaaaggtttaaaagccaaaactggtggtgaattagctgaagctattaaagttgccttagccaatactgatgggccaaccttaattgaatgttttattggtcgcgaagattgtaccgaagaattagttaaatggggtaaacgtgttgctgctgctaattctcgcaaacccgtgaataaattattgtaatttttggggatcaattcgagctcagcaagtttcatcccgaccccctcagggtcgggatttttttattgtactagttgacataagtaaaggcatcccctgcgtgatataattaccttcagtttaaggaggtatacacatatgtctgaaactaaatttaaggcctatgccgttatgaatcccggcgaaaagctgcaaccctgggaatacgaaccggcgccgctgcaagtggatgaaattgaagtgcgggtgactcacaacggcctttgtcacaccgacctgcacatgagggacaatgactggaacgtgagcgaatttcccctcgttgccggccacgaagtcgttggagaagtgacggcagtcggggaaaaagtcacttcacgaaagaaaggcgatcgcgtgggggtgggttggatcagaaactcctgtcgggcctgcgatcattgtttgcaaggggaagaaaatatctgtcgcgaaggctatacaggtctgatcgtcgggcatcacggcggatttgccgatcgcgttcgggttccggccgatttcacctacaaaattcccgacgccttggactccgcgagtgccgcgccgctgctgtgtgccggcatcaccgtctacacccccctgcggacttatatcaaacacccggggatgaaagtcggggtgatgggaatcggcggactcggacatttagcgatcaaatttgcccgggcgatgggggcggaagtcacggctttttccacatccccgaataaagaagcccaagccaaggaatttggcgcccatcatttccaacagtggggaacagccgaagaaatgaaagcggtggccggaaatttcgatttggtgctttccaccatctccgccgaaactgattgggatgcggcgttcagtttgctggcaaataacggggttttgtgtttcgtcggcattccggtttccagtttgaacgtgccgctgattccgctgattttcggtcaaaaatccgtcgtcggcagcgtagtgggcggccggcggttcatggcagaaatgttggaatttgccgccgtgaatcagatcaaaccgatgatcgaaacgatgccgttgagtcaggtgaacgaggcgatggacaaggtagcggcgaataaagctcgctatcggatcgtgttgctttcggagtgaagatctcctgcagagaatataaaaagccagattattaatccggcttttttattatttaaatactgtgcacgatcctgcaggatcatcttgctgaaaaactcgagcgctcgttccgcaaagcggtacggagttagttaggggctaatgggcattctcccgtacaggaaagagttagaagttattaattatcaacaattctcctttgcctagtgcatcgttacctttttaattaaaacataaggaaaactaataatcgtaataatttaacctcaaagtgtaaagaaatgtgaaattctgacttttataacgttaaagagggaaaaattagcagtttaaaatacctagagaatagtctggggtaagcatagagaattagattagttaagttaatcaaattcagaaaaaataataatcgtaaatagttaatctgggtgtatagaaaatgatccccttcatgataagatttaaactcgaaaagcaaaagccaaaaaactaacttccattaaaagaagttgttacatataacgctataaagaaaatttatatatttggaggataccaaccatgtctcatattcaacgtgaaactagttgttctcgccctcgtttaaattctaatatggatgccgatttatatggttataaatgggctcgtgataatgttggtcaatctggtgctactatttatcgtttatatggtaaacctgatgctcctgaattattcttgaaacatggtaaaggttctgttgctaatgatgttactgatgaaatggttcgtttaaactggttgactgaatttatgcctttacctactattaaacattttattcgtactcccgatgatgcttggttattaactactgctattcctggtaaaactgcttttcaagttttagaagaatatcctgattctggtgaaaatattgttgatgctttagctgtttttttacgtcgtttacattctattcccgtttgtaattgtccttttaattctgatcgtgtttttcgtttagctcaagctcaatctcgtatgaataatggtttagttgatgcttctgattttgatgatgaacgtaatggttggcctgttgaacaagtttggaaagaaatgcacaaattgttacctttttctcctgattctgttgttactcatggtgatttttctttagataatttgatctttgatgaaggtaaattgattggttgtattgatgttggtcgtgttggtattgctgatcgttatcaagatttagctattttatggaattgtttaggtgaattttctccttctttacagaaacgtttatttcagaaatatggtattgataatcctgatatgaacaagttacaatttcatttaatgttggacgagttcttttaagaattaattcatgaccaaaatcccttaacgtgagttttcgttccactgagcgtcagaccccgtagaaaagatcaaaggatcttcttgagatcctttttttctgcgcgtaatctgctgctatttaaattacgtacacgtgttattactttgttaacgacaattgtcttaattaactgggcctcatgggccttccgctcactgcccgctttccagtcgggaaacctgtcgtgccagctctgcagatgacggtgaaaacctctgacacatgcagctcccggagacggtcacagcttgtctgtaagcggatgccgggagcagacaagcccgtcagggcgcgtcagcgggtgttggcgggtgtcggggcgcagccatgacccagtcacgtagcgatagcggagtgtatactggcttaactatgcggcatcagagcagattgtactgagagtgcaccatatgcggtgtgaaataccgcacagatgcgtaaggagaaaataccgcatcaggcgctcttccgcttcctcgctcactgactcgctgcgctcggtcgttcggctgcggcgagcggtatcagctcactcaaaggcggtaatacggttatccacagaatcaggggataacgcaggaaagaacatgtgagcaaaaggccagcaaaaggccaggaaccgtaaaaaggccgcgttgctggcgtttttccataggctccgcccccctgacgagcatcacaaaaatcgacgctcaagtcagaggtggcgaaacccgacaggactataaagataccaggcgtttccccctggaagctccctcgtgcgctctcctgttccgaccctgccgcttaccggatacctgtccgcctttctcccttcgggaagcgtggcgctttctcatagctcacgctgtaggtatctcagttcggtgtaggtcgttcgctccaagctgggctgtgtgcacgaaccccccgttcagcccgaccgctgcgccttatccggtaactatcgtcttgagtccaacccggtaagacacgacttatcgccactggcagcagccactggtaacaggattagcagagcgaggtatgtaggcggtgctacagagttcttgaagtggtggcctaactacggctacactagaaggacagtatttggtatctgcgctctgctgaagccagttaccttcggaaaaagagttggtagctcttgatccggcaaacaaaccaccgctggtagcggtggtttttttgtttgcaagcagcagattacgcgcagaaaaaaaggatctcaagaagatcctttgatcttttctactgcagaagcttgttagacaccctgtcatgtattttatattatttatttcaccatacggattaagtgaaacctaatgaaaatagtactttcggagctttaactttaatgaaggtatgtttttttatagacatcgatgtctggtttaacaataggaaaaagtagctaaaactcccatgaattaaagaaataacaaggtgtctaacaacctgttattaagaatgttagaaaagacttaacatttgtgttgagtttttatagacattggtgtctagacatacggtagataaggtttgctcaaaaataaaataaaaaaagattggactaaaaaacatttaatttagtacaatttaattagttattttttcgtctcaaattttgctttgttgagcagaaatttagataaaaaaatccccgtgatcagattacaatgtcgttcattgtacgatgtgtcgaaaaatctttacgacactctaaactgaccacacgggggaaaaagaaaactgaactaataacatcatgatactcggaaaacctagcaattctcaacccctaaacaaaagaaacttccaaaaccctgaccatataaaggagtggcaacaatcagcaatcagtcaagatttgatagcagaaaatcttgtatcggttgctaatggttttgatgtactatttatcggcaataaataccgaactaacacgggtgttctgtcacggcacatattaaactcctattctcatttagaagatggtggttcgtatggtagaacatttgacccatttaccaataaagaaatgcagtgggttcaatttaaaccgaatagaccaagaaaaggttctactggtaaggtaatcaaatatgaatcgccaaaaggtgaacctacaagagttctaatgccgtttgtgcctatgaaaatatggcaacggattagcgataagttcggagtaccgattaatccgaaaaaagatactcacttttgggaatgggtaaagaataatccatcgataccgattgccattacagaaggaaataaaaaagctaattgcctattatcctatggctatcctgctattgcctttgtaggcatttggaacggattagagaaaataaatgatttctcgaaggaaaagcagttaaaagaggatttgaaatggttgttatccaacggcaaccgaaatattaatatcatctttgaccaagaccagaaacaaaaaactgtaattaatgtaaacaaagctattttcgctttatcttctctaataagtagaaatggtcataaagttaatattgtgcaatggttgccgtcaaaaggtaaaggaatagatgattatttggtagctttaccttttgagaaaagagaaaatcatttagacaacttaattaaaattgcaccatcatttaatttttggtcaactaaatacttattcaagtgtcgtaaaccagatttaaccgtaaattgccgttatttgagcgatgcagtaaaagaattacctcaagaggatatagcattaatagcacctcacggcacgggtaaaacttcattagtagctactcacgttaagaatcggagttatcacggaaggaaaactatttcattggtgcatcttgaaagtttagccaaagctaatggcaacgcacttggattatattaccgaaccgaaaataatattgaaaagcaatatcttggatttagcttatgtgtagatagttgccgtgataagattaacggcattacaactgatattatttcaggtcaagattattgccttttcattgatgaaattgaccaagtaattccacacatccttaacagtgaaactgaagtaagtaagtatagatgcaccatcattgacactttttctgaactggtgagaaatgctgaacaggtcattattgctgatgctgatttatccgatgtgacgattgacctaatagaaaacatcagaggtaaaaaactatatgtaatcaagaatgaatatcagtatcagggaatgacttttaacgccgttggttcaccattagaaatgatggcaatgatgggaaaatcggtgtcagaaggcaagaaattatttattaacaccacatcccaaaaggcaaaaagtaagtacggcacaatcgctcttgagtcttatatttttggtctaaataaagaagcaaagatattaagaatagactctgaaaccactaaaaaccctgaacatccagcctataaaatcattgaccaagacttaaataatatcctcaaagattatgattatgtcattgcctcaccttgccttcaaacaggtgtcagtattaccttaaaagggcattttgaccagcaatttaacttttccagtggaaacattacacctcattgctttttacagcaaatgtggcggttgagggatgcagaaattgaaagattctattatgtgccgaactcatctaacctcaatctcattgggaataagtcaagttcaccatcagaccttctaaagagcaataacaagatggcaacggcaacggttaaccttttgggtagaatcgactccgaatattccctagagtatgaatcgcacggcatttggcttgagacgtgggcaaaattatcagcacggcataacagttcaatgcgttgttactctgaaattcttacctatctaattacgtctcaagggcataaattaaatatcaacattccctcacctcttgcagatattaagaagctaaatgatgaggtaagtagtaacagggaaaaggtaaaaaatgagagatactctcagaggttaaactcaccagatattaacgatgcagaagctaccatactcgaatctaaagagcaaaaaatcggattgactctcaatgagagatgcaccctagaaaagcataaagttaagaagcggtatgggaatgtaaagatggatattctcacctttgatgatgatggactataccccaaactcagactattttattacctcaccatcggtaaacctcatctcaaggctaatgacagaaaagctattgccaaaatgggcaatgacaataaaggcaagattctatcaaaagacttagttaataaaacttactccgctcgtgtgaaggtcttagagattcttaaactaactgactttatcgacaatcttagagatgaactcttaataactcccaataatccagctatcaccgattttaataatcttctgctaagagctaagaaggatttaagagtattaggagtcaacatcggaaaatatccaatggccaacattaatgccgtacttactctcattggtcacaaactttctgtaatgagagatgagttcggaaaagagaaaaggataaaagtagatggtaaatcataccgatgttatcaacttgaaacattaccagattttaccaatgatactcttgactactggttagaaaatgatagccaaaaagaagtaacagcaacagaaaattactccgaaaattttaacccttcaaatagctacaatccagacagtaagacactttcagagggtgcaaatttcctatatataaataaagaagaattgcatccaaataaattgcacctagaaataaaagaaggtgctgaactttttttattcggggtaaaggtgattgtgaaaggaatcttggacggggcagtaactatattctctatgggtcaagaatacgatttatccctcaatgaactagaggggatgttaacatcatgaactttacaagaatctttttaaagggcgatcgcaccatgttaaatgatggtacatttgttcagatatttgatatttaccatgaccacgcattgggagtgacccttgaccttaagacagaaaaaattatttccgatgatgttagggtaattactgtcaaagacttattgttcgatggcacttataaaggggtaaaatcttttatgcccgataatgcccgataatgcccgattgatgctacaaaatcccataatcataagcgataatcccctaatagcttgtaattcttgaaccgtagcgattttagagtattccaaaaagaagaaataaacaccgcaaaatgtcgtatttcacatatataaaccaaggttttttgccctaaaatctttatgtttgtagtgtgatgttgggtcaaaatggtcagaaaagttgcaaggtttttatggatgcttacgcgcgcgaggggtaagcatccccaaatagttactttatcctagtccatgcccatttattgccgtcccgttcggctttaaaaaagtgccaaaactcacaaggtgcaataaaaagttctgtacctttcgcaaccctagataatctttcaacagttactttttttcctattatctcggtacaaagtttggctagtttctcttttccctctttttcaatcaagccttcttgtatgcccaactcattgattaatctctctatttttaccattatttcccgttcaggtagtttatcccctaaatcttcatcggggggcaatgtagggcattctgaaggggctttttcttctgtctggacattatctaatattgaagtaaccaaactatcttcagttttttctattcctattaattcatattcggttactgtatccgtatcaatatccgaataactatctttatccgtattagctattcggttaagtttatccgttaactcagaaacaagactatatagcggttttagcttttcttctatcctgttatctaatacggataagtttatacggttatcattatccgtattagtatcattgggcttttttggtagttctaccccctcataaaccgcttttattcccaattccaacagactgataacagtatcctttataatgggttttttgctgatatggtgaacttttgccccttccatcattgcgatactttctatctcactcatcaacttatcgcttaagtgaatctcgtatctgtttaatcccttactggttttattcatatccgtttactttattcggttaacaattctattttatacgaataaaatattatacggttaactttatacgtttaactattttatctatacggataacagtaataagttattcgtattagttatacgtttacttttatccaaataaaattagtgcatttaaactaaaagaatgattttatcggagttgatagcattggattaacctaaagatgtttataagctatatctgataagtatttaaggttattttgttattctgtttattgacattatcagaataaaagaatagaatataattgttgagagataagaggtttaagtgattatggttaagaagttagttggttatgtcagggtcagtagtgaatcgcaagaggataacactagcttacagaatcagatagagagaattgaagcatattgtatggcttttggttatgagttggtaaaaatattcaaagaggttgccactggtacaaaagcagatattgaaacccgtcctatttttaatgaagctatagaatacttgaaacaggataatgctaatggaattattgccttgaagctagaccgaatcgcacggaatgctttagatgtattgcgtttggttcgtgaaaccttagaaccacaaaataaaatgttagtgttactagatattcaggtagatacttcgacaccttcaggaaaaatgattttaactgtaatgagtgccgttgctgaactcgaaagagacatgatctatgatcgcactcaggggggtagaaagactaaagcccaaaagggcgggtatgcctacgggaaacctaaatttggctataagactgaagaaaaggaactaaaagaagattcagcacaacaggaaactattaaactaattaagagacaccgtaggtcagggaaaagctaccagaaaatagctgattatctcaatgcccaaagtattcccactaaacaaggtaagaaatggagttctagcgtcgtctatcgaatctgtcaggaaaaagctggttaagtctgtttatagatatttagaatttattgaataaaaatagtatgaacaataaatatttatggactaaccacgctcggaaacgtttaactgaacgatgggaaataaaagaatcatgggttattgataccatcgaaaatcctgaacgttcagaatttattgttgatgagtcaggggaaaaatatcattactataaaagaatagctaagtttaagaatagagtgttagaagtgataacttctgccaactcaacacccacaagaataataaccttttactttaaccgtaacatgaggaaaaatttatgattgttacttacgataatgaagttgacgcaatttattttaagttaacggaaaataaaattgatagcaccgaacctcaaacagacaggattatcattgattacgatgaaagtaataatattgttggcattgaggtattagattttaattatcttgtcaagaaaggtttaaccgttgctgatttacctttttctgaagatgaaagattaacagcttctcaatattttaattttcctgttgctatctaatccagaaggggcaataatccccttctttcatcgagttagacttaatatcacaaaagtcattttcattttaccgtttcttttccacagcgtccgtacgcccctcgttaaatctcaaaaccgacaatttatgatgtttataaaaagttactcactttaataagtatttatactcattaaagggttattctttttttgtagcctgataggttgggaaggaatatttcagattatcagatttgttgaatatttttcgtcagatacgcaaaccttacaaacataattaacaactgaaactattgatatgtctaggttttagctctatcacaggttggatctg

SEQ ID NO: 78 - DNA, 12683 bp, Cyanobacterium sp. ABICyano1
tcgacaattaataacttcttcctgtacgggcgaatggccatttgctcctaactaactccgtactgctttgcggaacgagcgtagcgaactctccgaattactaagccttcatccctgatagatgcaaaaaacgaattaaaattatgtgtaaaaagaaaatgtgtctttatttagtagtcaaagttacaaaatattaagaatcaaattaataatgtattgggcagttaagtatataagtctttaaatatttatttgtattcaatatattaaccgaggacaaattatgaattcttataccgtgggtacttatttagccgaacgcttagtgcaaattggtttaaaacatcattttgccgtggctggggactataatttagtgttattggataacttattattaaataaaaacatggaacaagtgtattgttgtaatgaattaaattgtggtttttctgctgaaggttatgctagagctaaaggtgcagctgctgctgttgttacttattctgtgggtgctttatctgcttttgatgctattggtggtgcttatgccgaaaatttacccgtgattttaatttctggtgcccctaataataatgatcatgccgctggacatgttttacatcatgccttaggtaaaaccgattatcattatcaattagaaatggccaaaaatattactgctgctgccgaagctatttatactcctgaagaagcccctgccaaaattgatcatgtgattaaaaccgccttacgcgaaaaaaaacccgtgtatttagaaattgcctgtaatattgcttctatgccttgtgctgctcctgggcctgcttctgctttatttaatgatgaagcctctgatgaagctagtttaaatgctgccgtggaagaaaccttaaaatttattgccaatcgcgataaagttgccgtgttagttggttctaaattaagagctgctggtgctgaagaagctgctgttaaatttgctgatgctttaggtggtgcagttgctactatggctgctgccaaatctttttttcccgaagaaaatccccattatattggaactagttggggagaagtttcttatcctggtgtggaaaaaactatgaaagaagccgacgctgttattgctttagcccctgtgtttaatgattattctaccactggttggactgatattcccgatcccaaaaaattagttttagccgaacctcgttctgttgttgttaatggtgttcgctttccctctgtgcatttaaaagattatttaacccgcttagcccaaaaagtttctaaaaaaactggtgccttagatttttttaaatctttaaatgcgggtgaattaaaaaaagctgctcctgctgatccttctgctcctttagttaatgctgaaattgcccgtcaagttgaagccttattaacccctaatactaccgttattgccgaaactggtgattcttggtttaatgcccaacgcatgaaattacctaatggtgcccgtgttgaatatgaaatgcaatggggtcatattggttggtctgtacctgctgcttttggttatgctgttggtgctcctgaacgtcgtaatattttaatggtgggtgatggttcttttcaattaactgcccaagaagttgcccaaatggttcgcttaaaattacccgttattatttttttaataaataattatggttataccattgaagtgatgattcatgatgggccatataataatattaaaaattgggattatgcgggtttaatggaagtgtttaatggtaatggtggttatgattctggtgctggtaaaggtttaaaagccaaaactggtggtgaattagctgaagctattaaagttgccttagccaatactgatgggccaaccttaattgaatgttttattggtcgcgaagattgtaccgaagaattagttaaatggggtaaacgtgttgctgctgctaattctcgcaaacccgtgaataaattattgtaatttttggggatcaattcgagctcagcaagtttcatcccgaccccctcagggtcgggatttttttattgtactagttgacataagtaaaggcatcccctgcgtgatataattaccttcagtttaaggaggtatacacatatgactaccgctactaaatttaaagcatacgccgcattaaattctggtgaaaaattacagccctgggaatacgaacctgaacctttacaggttgatgaggttgagatccgtgtaacccataacggtttatgtcatactgatttacacatgcgtgataatgattggaacgtaagtcaatatcctttagtacccggtcacgaagtagttggtgaggttaccgaggttggtgaaaaagtaaccagtttacacaaaggagacagaattggtgtaggatggattagaaattcttgtcgttcttgtgatcactgtttacaaggagaggaaaacatctgtcgtgaaggatacactggtttaattgttggacaccacggtggtttcgctgatcgtttacgtgtacctgctgatttcacctacaaaattcctgatgcattagattctgcctctgccgctcccttattatgtgctggtattactgtttatacccccttaagaacttacatcaaacaccccggtatgaaagttggtgtaatgggaattggtggtttaggtcatttagctattaaatttgctagagctatgggagctgaagtaactgcattttctacttctttaaacaaacaagaacaggcaaaagagtttggagcacacaattttcagcaatggggaactgctgaagagatgaaagctattgctggttctttcgatttagttttatctactatctctagtgaaactgattgggatgctgctttctctttattagctaacaatggtgtattatgttttgttggtattcctgtttctaccttaaatattcctttaatccctttaatctttggtcaaaaagctgtagtaggaagtattgttggtggaagacgttttatggctgagatgttagaatttgctgccgttaatcagatcaaacccatgattgagactatgcctttaagtcaaatcaacgaggctatggataaagttgcagctaatcaagcccgttatcgtattgtattattagcagactaactagatctcctgcagagaatataaaaagccagattattaatccggcttttttattatttaaatactgtgcacgatcctgcaggatcatcttgctgaaaaactcgagcgctcgttccgcaaagcggtacggagttagttaggggctaatgggcattctcccgtacaggaaagagttagaagttattaattatcaacaattctcctttgcctagtgcatcgttacctttttaattaaaacataaggaaaactaataatcgtaataatttaacctcaaagtgtaaagaaatgtgaaattctgacttttataacgttaaagagggaaaaattagcagtttaaaatacctagagaatagtctggggtaagcatagagaattagattagttaagttaatcaaattcagaaaaaataataatcgtaaatagttaatctgggtgtatagaaaatgatccccttcatgataagatttaaactcgaaaagcaaaagccaaaaaactaacttccattaaaagaagttgttacatataacgctataaagaaaatttatatatttggaggataccaaccatgtctcatattcaacgtgaaactagttgttctcgccctcgtttaaattctaatatggatgccgatttatatggttataaatgggctcgtgataatgttggtcaatctggtgctactatttatcgtttatatggtaaacctgatgctcctgaattattcttgaaacatggtaaaggttctgttgctaatgatgttactgatgaaatggttcgtttaaactggttgactgaatttatgcctttacctactattaaacattttattcgtactcccgatgatgcttggttattaactactgctattcctggtaaaactgcttttcaagttttagaagaatatcctgattctggtgaaaatattgttgatgctttagctgtttttttacgtcgtttacattctattcccgtttgtaattgtccttttaattctgatcgtgtttttcgtttagctcaagctcaatctcgtatgaataatggtttagttgatgcttctgattttgatgatgaacgtaatggttggcctgttgaacaagtttggaaagaaatgcacaaattgttacctttttctcctgattctgttgttactcatggtgatttttctttagataatttgatctttgatgaaggtaaattgattggttgtattgatgttggtcgtgttggtattgctgatcgttatcaagatttagctattttatggaattgtttaggtgaattttctccttctttacagaaacgtttatttcagaaatatggtattgataatcctgatatgaacaagttacaatttcatttaatgttggacgagttcttttaagaattaattcatgaccaaaatcccttaacgtgagttttcgttccactgagcgtcagaccccgtagaaaagatcaaaggatcttcttgagatcctttttttctgcgcgtaatctgctgctatttaaattacgtacacgtgttattactttgttaacgacaattgtcttaattaactgggcctcatgggccttccgctcactgcccgctttccagtcgggaaacctgtcgtgccagctctgcagatgacggtgaaaacctctgacacatgcagctcccggagacggtcacagcttgtctgtaagcggatgccgggagcagacaagcccgtcagggcgcgtcagcgggtgttggcgggtgtcggggcgcagccatgacccagtcacgtagcgatagcggagtgtatactggcttaactatgcggcatcagagcagattgtactgagagtgcaccatatgcggtgtgaaataccgcacagatgcgtaaggagaaaataccgcatcaggcgctcttccgcttcctcgctcactgactcgctgcgctcggtcgttcggctgcggcgagcggtatcagctcactcaaaggcggtaatacggttatccacagaatcaggggataacgcaggaaagaacatgtgagcaaaaggccagcaaaaggccaggaaccgtaaaaaggccgcgttgctggcgtttttccataggctccgcccccctgacgagcatcacaaaaatcgacgctcaagtcagaggtggcgaaacccgacaggactataaagataccaggcgtttccccctggaagctccctcgtgcgctctcctgttccgaccctgccgcttaccggatacctgtccgcctttctcccttcgggaagcgtggcgctttctcatagctcacgctgtaggtatctcagttcggtgtaggtcgttcgctccaagctgggctgtgtgcacgaaccccccgttcagcccgaccgctgcgccttatccggtaactatcgtcttgagtccaacccggtaagacacgacttatcgccactggcagcagccactggtaacaggattagcagagcgaggtatgtaggcggtgctacagagttcttgaagtggtggcctaactacggctacactagaaggacagtatttggtatctgcgctctgctgaagccagttaccttcggaaaaagagttggtagctcttgatccggcaaacaaaccaccgctggtagcggtggtttttttgtttgcaagcagcagattacgcgcagaaaaaaaggatctcaagaagatcctttgatcttttctactgcagaagcttgttagacaccctgtcatgtattttatattatttatttcaccatacggattaagtgaaacctaatgaaaatagtactttcggagctttaactttaatgaaggtatgtttttttatagacatcgatgtctggtttaacaataggaaaaagtagctaaaactcccatgaattaaagaaataacaaggtgtctaacaacctgttattaagaatgttagaaaagacttaacatttgtgttgagtttttatagacattggtgtctagacatacggtagataaggtttgctcaaaaataaaataaaaaaagattggactaaaaaacatttaatttagtacaatttaattagttattttttcgtctcaaattttgctttgttgagcagaaatttagataaaaaaatccccgtgatcagattacaatgtcgttcattgtacgatgtgtcgaaaaatctttacgacactctaaactgaccacacgggggaaaaagaaaactgaactaataacatcatgatactcggaaaacctagcaattctcaacccctaaacaaaagaaacttccaaaaccctgaccatataaaggagtggcaacaatcagcaatcagtcaagatttgatagcagaaaatcttgtatcggttgctaatggttttgatgtactatttatcggcaataaataccgaactaacacgggtgttctgtcacggcacatattaaactcctattctcatttagaagatggtggttcgtatggtagaacatttgacccatttaccaataaagaaatgcagtgggttcaatttaaaccgaatagaccaagaaaaggttctactggtaaggtaatcaaatatgaatcgccaaaaggtgaacctacaagagttctaatgccgtttgtgcctatgaaaatatggcaacggattagcgataagttcggagtaccgattaatccgaaaaaagatactcacttttgggaatgggtaaagaataatccatcgataccgattgccattacagaaggaaataaaaaagctaattgcctattatcctatggctatcctgctattgcctttgtaggcatttggaacggattagagaaaataaatgatttctcgaaggaaaagcagttaaaagaggatttgaaatggttgttatccaacggcaaccgaaatattaatatcatctttgaccaagaccagaaacaaaaaactgtaattaatgtaaacaaagctattttcgctttatcttctctaataagtagaaatggtcataaagttaatattgtgcaatggttgccgtcaaaaggtaaaggaatagatgattatttggtagctttaccttttgagaaaagagaaaatcatttagacaacttaattaaaattgcaccatcatttaatttttggtcaactaaatacttattcaagtgtcgtaaaccagatttaaccgtaaattgccgttatttgagcgatgcagtaaaagaattacctcaagaggatatagcattaatagcacctcacggcacgggtaaaacttcattagtagctactcacgttaagaatcggagttatcacggaaggaaaactatttcattggtgcatcttgaaagtttagccaaagctaatggcaacgcacttggattatattaccgaaccgaaaataatattgaaaagcaatatcttggatttagcttatgtgtagatagttgccgtgataagattaacggcattacaactgatattatttcaggtcaagattattgccttttcattgatgaaattgaccaagtaattccacacatccttaacagtgaaactgaagtaagtaagtatagatgcaccatcattgacactttttctgaactggtgagaaatgctgaacaggtcattattgctgatgctgatttatccgatgtgacgattgacctaatagaaaacatcagaggtaaaaaactatatgtaatcaagaatgaatatcagtatcagggaatgacttttaacgccgttggttcaccattagaaatgatggcaatgatgggaaaatcggtgtcagaaggcaagaaattatttattaacaccacatcccaaaaggcaaaaagtaagtacggcacaatcgctcttgagtcttatatttttggtctaaataaagaagcaaagatattaagaatagactctgaaaccactaaaaaccctgaacatccagcctataaaatcattgaccaagacttaaataatatcctcaaagattatgattatgtcattgcctcaccttgccttcaaacaggtgtcagtattaccttaaaagggcattttgaccagcaatttaacttttccagtggaaacattacacctcattgctttttacagcaaatgtggcggttgagggatgcagaaattgaaagattctattatgtgccgaactcatctaacctcaatctcattgggaataagtcaagttcaccatcagaccttctaaagagcaataacaagatggcaacggcaacggttaaccttttgggtagaatcgactccgaatattccctagagtatgaatcgcacggcatttggcttgagacgtgggcaaaattatcagcacggcataacagttcaatgcgttgttactctgaaattcttacctatctaattacgtctcaagggcataaattaaatatcaacattccctcacctcttgcagatattaagaagctaaatgatgaggtaagtagtaacagggaaaaggtaaaaaatgagagatactctcagaggttaaactcaccagatattaacgatgcagaagctaccatactcgaatctaaagagcaaaaaatcggattgactctcaatgagagatgcaccctagaaaagcataaagttaagaagcggtatgggaatgtaaagatggatattctcacctttgatgatgatggactataccccaaactcagactattttattacctcaccatcggtaaacctcatctcaaggctaatgacagaaaagctattgccaaaatgggcaatgacaataaaggcaagattctatcaaaagacttagttaataaaacttactccgctcgtgtgaaggtcttagagattcttaaactaactgactttatcgacaatcttagagatgaactcttaataactcccaataatccagctatcaccgattttaataatcttctgctaagagctaagaaggatttaagagtattaggagtcaacatcggaaaatatccaatggccaacattaatgccgtacttactctcattggtcacaaactttctgtaatgagagatgagttcggaaaagagaaaaggataaaagtagatggtaaatcataccgatgttatcaacttgaaacattaccagattttaccaatgatactcttgactactggttagaaaatgatagccaaaaagaagtaacagcaacagaaaattactccgaaaattttaacccttcaaatagctacaatccagacagtaagacactttcagagggtgcaaatttcctatatataaataaagaagaattgcatccaaataaattgcacctagaaataaaagaaggtgctgaactttttttattcggggtaaaggtgattgtgaaaggaatcttggacggggcagtaactatattctctatgggtcaagaatacgatttatccctcaatgaactagaggggatgttaacatcatgaactttacaagaatctttttaaagggcgatcgcaccatgttaaatgatggtacatttgttcagatatttgatatttaccatgaccacgcattgggagtgacccttgaccttaagacagaaaaaattatttccgatgatgttagggtaattactgtcaaagacttattgttcgatggcacttataaaggggtaaaatcttttatgcccgataatgcccgataatgcccgattgatgctacaaaatcccataatcataagcgataatcccctaatagcttgtaattcttgaaccgtagcgattttagagtattccaaaaagaagaaataaacaccgcaaaatgtcgtatttcacatatataaaccaaggttttttgccctaaaatctttatgtttgtagtgtgatgttgggtcaaaatggtcagaaaagttgcaaggtttttatggatgcttacgcgcgcgaggggtaagcatccccaaatagttactttatcctagtccatgcccatttattgccgtcccgttcggctttaaaaaagtgccaaaactcacaaggtgcaataaaaagttctgtacctttcgcaaccctagataatctttcaacagttactttttttcctattatctcggtacaaagtttggctagtttctcttttccctctttttcaatcaagccttcttgtatgcccaactcattgattaatctctctatttttaccattatttcccgttcaggtagtttatcccctaaatcttcatcggggggcaatgtagggcattctgaaggggctttttcttctgtctggacattatctaatattgaagtaaccaaactatcttcagttttttctattcctattaattcatattcggttactgtatccgtatcaatatccgaataactatctttatccgtattagctattcggttaagtttatccgttaactcagaaacaagactatatagcggttttagcttttcttctatcctgttatctaatacggataagtttatacggttatcattatccgtattagtatcattgggcttttttggtagttctaccccctcataaaccgcttttattcccaattccaacagactgataacagtatcctttataatgggttttttgctgatatggtgaacttttgccccttccatcattgcgatactttctatctcactcatcaacttatcgcttaagtgaatctcgtatctgtttaatcccttactggttttattcatatccgtttactttattcggttaacaattctattttatacgaataaaatattatacggttaactttatacgtttaactattttatctatacggataacagtaataagttattcgtattagttatacgtttacttttatccaaataaaattagtgcatttaaactaaaagaatgattttatcggagttgatagcattggattaacctaaagatgtttataagctatatctgataagtatttaaggttattttgttattctgtttattgacattatcagaataaaagaatagaatataattgttgagagataagaggtttaagtgattatggttaagaagttagttggttatgtcagggtcagtagtgaatcgcaagaggataacactagcttacagaatcagatagagagaattgaagcatattgtatggcttttggttatgagttggtaaaaatattcaaagaggttgccactggtacaaaagcagatattgaaacccgtcctatttttaatgaagctatagaatacttgaaacaggataatgctaatggaattattgccttgaagctagaccgaatcgcacggaatgctttagatgtattgcgtttggttcgtgaaaccttagaaccacaaaataaaatgttagtgttactagatattcaggtagatacttcgacaccttcaggaaaaatgattttaactgtaatgagtgccgttgctgaactcgaaagagacatgatctatgatcgcactcaggggggtagaaagactaaagcccaaaagggcgggtatgcctacgggaaacctaaatttggctataagactgaagaaaaggaactaaaagaagattcagcacaacaggaaactattaaactaattaagagacaccgtaggtcagggaaaagctaccagaaaatagctgattatctcaatgcccaaagtattcccactaaacaaggtaagaaatggagttctagcgtcgtctatcgaatctgtcaggaaaaagctggttaagtctgtttatagatatttagaatttattgaataaaaatagtatgaacaataaatatttatggactaaccacgctcggaaacgtttaactgaacgatgggaaataaaagaatcatgggttattgataccatcgaaaatcctgaacgttcagaatttattgttgatgagtcaggggaaaaatatcattactataaaagaatagctaagtttaagaatagagtgttagaagtgataacttctgccaactcaacacccacaagaataataaccttttactttaaccgtaacatgaggaaaaatttatgattgttacttacgataatgaagttgacgcaatttattttaagttaacggaaaataaaattgatagcaccgaacctcaaacagacaggattatcattgattacgatgaaagtaataatattgttggcattgaggtattagattttaattatcttgtcaagaaaggtttaaccgttgctgatttacctttttctgaagatgaaagattaacagcttctcaatattttaattttcctgttgctatctaatccagaaggggcaataatccccttctttcatcgagttagacttaatatcacaaaagtcattttcattttaccgtttcttttccacagcgtccgtacgcccctcgttaaatctcaaaaccgacaatttatgatgtttataaaaagttactcactttaataagtatttatactcattaaagggttattctttttttgtagcctgataggttgggaaggaatatttcagattatcagatttgttgaatatttttcgtcagatacgcaaaccttacaaacataattaacaactgaaactattgatatgtctaggttttagctctatcacaggttggatctg

SEQ ID NO: 79 - DNA, 12683 bp, Cyanobacterium sp. ABICyano1
tcgacaattaataacttcttcctgtacgggcgaatggccatttgctcctaactaactccgtactgctttgcggaacgagcgtagcgaactctccgaattactaagccttcatccctgatagatgcaaaaaacgaattaaaattatgtgtaaaaagaaaatgtgtctttatttagtagtcaaagttacaaaatattaagaatcaaattaataatgtattgggcagttaagtatataagtctttaaatatttatttgtattcaatatattaaccgaggacaaattatgaattcttataccgtgggtacttatttagccgaacgcttagtgcaaattggtttaaaacatcattttgccgtggctggggactataatttagtgttattggataacttattattaaataaaaacatggaacaagtgtattgttgtaatgaattaaattgtggtttttctgctgaaggttatgctagagctaaaggtgcagctgctgctgttgttacttattctgtgggtgctttatctgcttttgatgctattggtggtgcttatgccgaaaatttacccgtgattttaatttctggtgcccctaataataatgatcatgccgctggacatgttttacatcatgccttaggtaaaaccgattatcattatcaattagaaatggccaaaaatattactgctgctgccgaagctatttatactcctgaagaagcccctgccaaaattgatcatgtgattaaaaccgccttacgcgaaaaaaaacccgtgtatttagaaattgcctgtaatattgcttctatgccttgtgctgctcctgggcctgcttctgctttatttaatgatgaagcctctgatgaagctagtttaaatgctgccgtggaagaaaccttaaaatttattgccaatcgcgataaagttgccgtgttagttggttctaaattaagagctgctggtgctgaagaagctgctgttaaatttgctgatgctttaggtggtgcagttgctactatggctgctgccaaatctttttttcccgaagaaaatccccattatattggaactagttggggagaagtttcttatcctggtgtggaaaaaactatgaaagaagccgacgctgttattgctttagcccctgtgtttaatgattattctaccactggttggactgatattcccgatcccaaaaaattagttttagccgaacctcgttctgttgttgttaatggtgttcgctttccctctgtgcatttaaaagattatttaacccgcttagcccaaaaagtttctaaaaaaactggtgccttagatttttttaaatctttaaatgcgggtgaattaaaaaaagctgctcctgctgatccttctgctcctttagttaatgctgaaattgcccgtcaagttgaagccttattaacccctaatactaccgttattgccgaaactggtgattcttggtttaatgcccaacgcatgaaattacctaatggtgcccgtgttgaatatgaaatgcaatggggtcatattggttggtctgtacctgctgcttttggttatgctgttggtgctcctgaacgtcgtaatattttaatggtgggtgatggttcttttcaattaactgcccaagaagttgcccaaatggttcgcttaaaattacccgttattatttttttaataaataattatggttataccattgaagtgatgattcatgatgggccatataataatattaaaaattgggattatgcgggtttaatggaagtgtttaatggtaatggtggttatgattctggtgctggtaaaggtttaaaagccaaaactggtggtgaattagctgaagctattaaagttgccttagccaatactgatgggccaaccttaattgaatgttttattggtcgcgaagattgtaccgaagaattagttaaatggggtaaacgtgttgctgctgctaattctcgcaaacccgtgaataaattattgtaatttttggggatcaattcgagctcagcaagtttcatcccgaccccctcagggtcgggatttttttattgtactagttgacataagtaaaggcatcccctgcgtgatataattaccttcagtttaaggaggtatacacatatgactacagcaactaaatttaaggcttatgcggctttaaattccggtgaaaaattgcaaccttgggaatatgaaccagaacctctacaggttgatgaagtagaaattcgagtcactcacaacggcttgtgtcatacggatcttcacatgagggataatgattggaatgtcagtcaatatcccctggttcccggtcatgaagtggttggagaagttacagaagttggggaaaaagtgacttctctacataaaggcgatcgcataggggttggctggattagaaattcctgtaggtcttgcgaccattgcttacaaggagaagaaaatatctgtcgcgagggctacacaggtctgattgtaggtcatcatgggggatttgctgaccgcctacgggttcccgcagattttacctataaaatacccgatgctttagactccgccagcgccgcccccctattatgtgccggaattaccgtttatacccccttgcggacctatataaaacaccccgggatgaaagttggggtgatgggaattggcggactcggacacttagcgattaagtttgctagggctatgggggctgaagttacggcgttttctacttctttaaataaacaagaacaagctaaggaatttggcgctcataacttccaacaatgggggacggctgaagaaatgaaggcgatcgccggaagttttgatctagtgctttctactatctcttcagaaactgattgggatgcggcttttagcttgttagctaataacggggttttgtgttttgtgggtatcccagtttcgactttaaatatacccctaattcctttgatttttggtcaaaaagctgtggtgggtagcattgtcggcggtcggcggtttatggcggaaatgctggagtttgcagcggtgaatcagattaaaccgatgattgaaactatgccattaagtcaaatcaatgaagctatggataaggtagccgctaatcaagcccgctatcggattgttttactagctgattagccagatctcctgcagagaatataaaaagccagattattaatccggcttttttattatttaaatactgtgcacgatcctgcaggatcatcttgctgaaaaactcgagcgctcgttccgcaaagcggtacggagttagttaggggctaatgggcattctcccgtacaggaaagagttagaagttattaattatcaacaattctcctttgcctagtgcatcgttacctttttaattaaaacataaggaaaactaataatcgtaataatttaacctcaaagtgtaaagaaatgtgaaattctgacttttataacgttaaagagggaaaaattagcagtttaaaatacctagagaatagtctggggtaagcatagagaattagattagttaagttaatcaaattcagaaaaaataataatcgtaaatagttaatctgggtgtatagaaaatgatccccttcatgataagatttaaactcgaaaagcaaaagccaaaaaactaacttccattaaaagaagttgttacatataacgctataaagaaaatttatatatttggaggataccaaccatgtctcatattcaacgtgaaactagttgttctcgccctcgtttaaattctaatatggatgccgatttatatggttataaatgggctcgtgataatgttggtcaatctggtgctactatttatcgtttatatggtaaacctgatgctcctgaattattcttgaaacatggtaaaggttctgttgctaatgatgttactgatgaaatggttcgtttaaactggttgactgaatttatgcctttacctactattaaacattttattcgtactcccgatgatgcttggttattaactactgctattcctggtaaaactgcttttcaagttttagaagaatatcctgattctggtgaaaatattgttgatgctttagctgtttttttacgtcgtttacattctattcccgtttgtaattgtccttttaattctgatcgtgtttttcgtttagctcaagctcaatctcgtatgaataatggtttagttgatgcttctgattttgatgatgaacgtaatggttggcctgttgaacaagtttggaaagaaatgcacaaattgttacctttttctcctgattctgttgttactcatggtgatttttctttagataatttgatctttgatgaaggtaaattgattggttgtattgatgttggtcgtgttggtattgctgatcgttatcaagatttagctattttatggaattgtttaggtgaattttctccttctttacagaaacgtttatttcagaaatatggtattgataatcctgatatgaacaagttacaatttcatttaatgttggacgagttcttttaagaattaattcatgaccaaaatcccttaacgtgagttttcgttccactgagcgtcagaccccgtagaaaagatcaaaggatcttcttgagatcctttttttctgcgcgtaatctgctgctatttaaattacgtacacgtgttattactttgttaacgacaattgtcttaattaactgggcctcatgggccttccgctcactgcccgctttccagtcgggaaacctgtcgtgccagctctgcagatgacggtgaaaacctctgacacatgcagctcccggagacggtcacagcttgtctgtaagcggatgccgggagcagacaagcccgtcagggcgcgtcagcgggtgttggcgggtgtcggggcgcagccatgacccagtcacgtagcgatagcggagtgtatactggcttaactatgcggcatcagagcagattgtactgagagtgcaccatatgcggtgtgaaataccgcacagatgcgtaaggagaaaataccgcatcaggcgctcttccgcttcctcgctcactgactcgctgcgctcggtcgttcggctgcggcgagcggtatcagctcactcaaaggcggtaatacggttatccacagaatcaggggataacgcaggaaagaacatgtgagcaaaaggccagcaaaaggccaggaaccgtaaaaaggccgcgttgctggcgtttttccataggctccgcccccctgacgagcatcacaaaaatcgacgctcaagtcagaggtggcgaaacccgacaggactataaagataccaggcgtttccccctggaagctccctcgtgcgctctcctgttccgaccctgccgcttaccggatacctgtccgcctttctcccttcgggaagcgtggcgctttctcatagctcacgctgtaggtatctcagttcggtgtaggtcgttcgctccaagctgggctgtgtgcacgaaccccccgttcagcccgaccgctgcgccttatccggtaactatcgtcttgagtccaacccggtaagacacgacttatcgccactggcagcagccactggtaacaggattagcagagcgaggtatgtaggcggtgctacagagttcttgaagtggtggcctaactacggctacactagaaggacagtatttggtatctgcgctctgctgaagccagttaccttcggaaaaagagttggtagctcttgatccggcaaacaaaccaccgctggtagcggtggtttttttgtttgcaagcagcagattacgcgcagaaaaaaaggatctcaagaagatcctttgatcttttctactgcagaagcttgttagacaccctgtcatgtattttatattatttatttcaccatacggattaagtgaaacctaatgaaaatagtactttcggagctttaactttaatgaaggtatgtttttttatagacatcgatgtctggtttaacaataggaaaaagtagctaaaactcccatgaattaaagaaataacaaggtgtctaacaacctgttattaagaatgttagaaaagacttaacatttgtgttgagtttttatagacattggtgtctagacatacggtagataaggtttgctcaaaaataaaataaaaaaagattggactaaaaaacatttaatttagtacaatttaattagttattttttcgtctcaaattttgctttgttgagcagaaatttagataaaaaaatccccgtgatcagattacaatgtcgttcattgtacgatgtgtcgaaaaatctttacgacactctaaactgaccacacgggggaaaaagaaaactgaactaataacatcatgatactcggaaaacctagcaattctcaacccctaaacaaaagaaacttccaaaaccctgaccatataaaggagtggcaacaatcagcaatcagtcaagatttgatagcagaaaatcttgtatcggttgctaatggttttgatgtactatttatcggcaataaataccgaactaacacgggtgttctgtcacggcacatattaaactcctattctcatttagaagatggtggttcgtatggtagaacatttgacccatttaccaataaagaaatgcagtgggttcaatttaaaccgaatagaccaagaaaaggttctactggtaaggtaatcaaatatgaatcgccaaaaggtgaacctacaagagttctaatgccgtttgtgcctatgaaaatatggcaacggattagcgataagttcggagtaccgattaatccgaaaaaagatactcacttttgggaatgggtaaagaataatccatcgataccgattgccattacagaaggaaataaaaaagctaattgcctattatcctatggctatcctgctattgcctttgtaggcatttggaacggattagagaaaataaatgatttctcgaaggaaaagcagttaaaagaggatttgaaatggttgttatccaacggcaaccgaaatattaatatcatctttgaccaagaccagaaacaaaaaactgtaattaatgtaaacaaagctattttcgctttatcttctctaataagtagaaatggtcataaagttaatattgtgcaatggttgccgtcaaaaggtaaaggaatagatgattatttggtagctttaccttttgagaaaagagaaaatcatttagacaacttaattaaaattgcaccatcatttaatttttggtcaactaaatacttattcaagtgtcgtaaaccagatttaaccgtaaattgccgttatttgagcgatgcagtaaaagaattacctcaagaggatatagcattaatagcacctcacggcacgggtaaaacttcattagtagctactcacgttaagaatcggagttatcacggaaggaaaactatttcattggtgcatcttgaaagtttagccaaagctaatggcaacgcacttggattatattaccgaaccgaaaataatattgaaaagcaatatcttggatttagcttatgtgtagatagttgccgtgataagattaacggcattacaactgatattatttcaggtcaagattattgccttttcattgatgaaattgaccaagtaattccacacatccttaacagtgaaactgaagtaagtaagtatagatgcaccatcattgacactttttctgaactggtgagaaatgctgaacaggtcattattgctgatgctgatttatccgatgtgacgattgacctaatagaaaacatcagaggtaaaaaactatatgtaatcaagaatgaatatcagtatcagggaatgacttttaacgccgttggttcaccattagaaatgatggcaatgatgggaaaatcggtgtcagaaggcaagaaattatttattaacaccacatcccaaaaggcaaaaagtaagtacggcacaatcgctcttgagtcttatatttttggtctaaataaagaagcaaagatattaagaatagactctgaaaccactaaaaaccctgaacatccagcctataaaatcattgaccaagacttaaataatatcctcaaagattatgattatgtcattgcctcaccttgccttcaaacaggtgtcagtattaccttaaaagggcattttgaccagcaatttaacttttccagtggaaacattacacctcattgctttttacagcaaatgtggcggttgagggatgcagaaattgaaagattctattatgtgccgaactcatctaacctcaatctcattgggaataagtcaagttcaccatcagaccttctaaagagcaataacaagatggcaacggcaacggttaaccttttgggtagaatcgactccgaatattccctagagtatgaatcgcacggcatttggcttgagacgtgggcaaaattatcagcacggcataacagttcaatgcgttgttactctgaaattcttacctatctaattacgtctcaagggcataaattaaatatcaacattccctcacctcttgcagatattaagaagctaaatgatgaggtaagtagtaacagggaaaaggtaaaaaatgagagatactctcagaggttaaactcaccagatattaacgatgcagaagctaccatactcgaatctaaagagcaaaaaatcggattgactctcaatgagagatgcaccctagaaaagcataaagttaagaagcggtatgggaatgtaaagatggatattctcacctttgatgatgatggactataccccaaactcagactattttattacctcaccatcggtaaacctcatctcaaggctaatgacagaaaagctattgccaaaatgggcaatgacaataaaggcaagattctatcaaaagacttagttaataaaacttactccgctcgtgtgaaggtcttagagattcttaaactaactgactttatcgacaatcttagagatgaactcttaataactcccaataatccagctatcaccgattttaataatcttctgctaagagctaagaaggatttaagagtattaggagtcaacatcggaaaatatccaatggccaacattaatgccgtacttactctcattggtcacaaactttctgtaatgagagatgagttcggaaaagagaaaaggataaaagtagatggtaaatcataccgatgttatcaacttgaaacattaccagattttaccaatgatactcttgactactggttagaaaatgatagccaaaaagaagtaacagcaacagaaaattactccgaaaattttaacccttcaaatagctacaatccagacagtaagacactttcagagggtgcaaatttcctatatataaataaagaagaattgcatccaaataaattgcacctagaaataaaagaaggtgctgaactttttttattcggggtaaaggtgattgtgaaaggaatcttggacggggcagtaactatattctctatgggtcaagaatacgatttatccctcaatgaactagaggggatgttaacatcatgaactttacaagaatctttttaaagggcgatcgcaccatgttaaatgatggtacatttgttcagatatttgatatttaccatgaccacgcattgggagtgacccttgaccttaagacagaaaaaattatttccgatgatgttagggtaattactgtcaaagacttattgttcgatggcacttataaaggggtaaaatcttttatgcccgataatgcccgataatgcccgattgatgctacaaaatcccataatcataagcgataatcccctaatagcttgtaattcttgaaccgtagcgattttagagtattccaaaaagaagaaataaacaccgcaaaatgtcgtatttcacatatataaaccaaggttttttgccctaaaatctttatgtttgtagtgtgatgttgggtcaaaatggtcagaaaagttgcaaggtttttatggatgcttacgcgcgcgaggggtaagcatccccaaatagttactttatcctagtccatgcccatttattgccgtcccgttcggctttaaaaaagtgccaaaactcacaaggtgcaataaaaagttctgtacctttcgcaaccctagataatctttcaacagttactttttttcctattatctcggtacaaagtttggctagtttctcttttccctctttttcaatcaagccttcttgtatgcccaactcattgattaatctctctatttttaccattatttcccgttcaggtagtttatcccctaaatcttcatcggggggcaatgtagggcattctgaaggggctttttcttctgtctggacattatctaatattgaagtaaccaaactatcttcagttttttctattcctattaattcatattcggttactgtatccgtatcaatatccgaataactatctttatccgtattagctattcggttaagtttatccgttaactcagaaacaagactatatagcggttttagcttttcttctatcctgttatctaatacggataagtttatacggttatcattatccgtattagtatcattgggcttttttggtagttctaccccctcataaaccgcttttattcccaattccaacagactgataacagtatcctttataatgggttttttgctgatatggtgaacttttgccccttccatcattgcgatactttctatctcactcatcaacttatcgcttaagtgaatctcgtatctgtttaatcccttactggttttattcatatccgtttactttattcggttaacaattctattttatacgaataaaatattatacggttaactttatacgtttaactattttatctatacggataacagtaataagttattcgtattagttatacgtttacttttatccaaataaaattagtgcatttaaactaaaagaatgattttatcggagttgatagcattggattaacctaaagatgtttataagctatatctgataagtatttaaggttattttgttattctgtttattgacattatcagaataaaagaatagaatataattgttgagagataagaggtttaagtgattatggttaagaagttagttggttatgtcagggtcagtagtgaatcgcaagaggataacactagcttacagaatcagatagagagaattgaagcatattgtatggcttttggttatgagttggtaaaaatattcaaagaggttgccactggtacaaaagcagatattgaaacccgtcctatttttaatgaagctatagaatacttgaaacaggataatgctaatggaattattgccttgaagctagaccgaatcgcacggaatgctttagatgtattgcgtttggttcgtgaaaccttagaaccacaaaataaaatgttagtgttactagatattcaggtagatacttcgacaccttcaggaaaaatgattttaactgtaatgagtgccgttgctgaactcgaaagagacatgatctatgatcgcactcaggggggtagaaagactaaagcccaaaagggcgggtatgcctacgggaaacctaaatttggctataagactgaagaaaaggaactaaaagaagattcagcacaacaggaaactattaaactaattaagagacaccgtaggtcagggaaaagctaccagaaaatagctgattatctcaatgcccaaagtattcccactaaacaaggtaagaaatggagttctagcgtcgtctatcgaatctgtcaggaaaaagctggttaagtctgtttatagatatttagaatttattgaataaaaatagtatgaacaataaatatttatggactaaccacgctcggaaacgtttaactgaacgatgggaaataaaagaatcatgggttattgataccatcgaaaatcctgaacgttcagaatttattgttgatgagtcaggggaaaaatatcattactataaaagaatagctaagtttaagaatagagtgttagaagtgataacttctgccaactcaacacccacaagaataataaccttttactttaaccgtaacatgaggaaaaatttatgattgttacttacgataatgaagttgacgcaatttattttaagttaacggaaaataaaattgatagcaccgaacctcaaacagacaggattatcattgattacgatgaaagtaataatattgttggcattgaggtattagattttaattatcttgtcaagaaaggtttaaccgttgctgatttacctttttctgaagatgaaagattaacagcttctcaatattttaattttcctgttgctatctaatccagaaggggcaataatccccttctttcatcgagttagacttaatatcacaaaagtcattttcattttaccgtttcttttccacagcgtccgtacgcccctcgttaaatctcaaaaccgacaatttatgatgtttataaaaagttactcactttaataagtatttatactcattaaagggttattctttttttgtagcctgataggttgggaaggaatatttcagattatcagatttgttgaatatttttcgtcagatacgcaaaccttacaaacataattaacaactgaaactattgatatgtctaggttttagctctatcacaggttggatctg

SEQ ID NO: 80 - DNA, 12698 bp, Cyanobacterium sp. ABICyano1
tcgacaattaataacttcttcctgtacgggcgaatggccatttgctcctaactaactccgtactgctttgcggaacgagcgtagcgaactctccgaattactaagccttcatccctgatagatgcaaaaaacgaattaaaattatgtgtaaaaagaaaatgtgtctttatttagtagtcaaagttacaaaatattaagaatcaaattaataatgtattgggcagttaagtatataagtctttaaatatttatttgtattcaatatattaaccgaggacaaattatgaattcttacactgttggaacctatttagcagaacgtttagttcaaattggtctcaaacaccattttgcagtagctggtgattataatttagttttattggataacttattgttaaataagaatatggaacaagtgtattgttgtaatgaattaaactgtggtttttctgctgagggatatgctcgtgcaaaaggtgctgccgcagcagttgttacttattctgttggagcattaagtgcttttgacgctattggaggtgcttatgcagaaaatttacctgtaatcttaatctctggtgcacccaataacaacgatcacgctgctggtcatgtattgcatcatgctttaggtaaaaccgattatcattaccaattagaaatggcaaaaaatattaccgctgccgcagaagctatttatactcccgaagaagcacctgctaagatcgatcacgtaattaaaaccgctctccgtgagaaaaaacccgtatatttagaaatcgcttgcaatatcgcttctatgccttgtgcagctcctggacctgctagtgctttatttaacgatgaagcatctgatgaggctagtttaaatgccgctgttgaagaaactttgaaatttattgctaatcgtgataaagtagctgttttagttggttctaaactccgtgccgctggtgcagaagaagcggctgtaaaattcgcagatgccttaggaggtgctgttgccacaatggcagccgctaaaagttttttccccgaagaaaatcctcattacattggtacttcttggggtgaggtatcttaccctggtgtagaaaaaaccatgaaggaagctgatgcagtaattgcattagctcctgttttcaatgattactctaccactggttggactgatattccagaccccaaaaaattagttttagcagaacctcgctctgtagttgtgaatggtgttagatttcccagtgtacatctcaaagattatttaactcgtttagctcaaaaagtgagtaaaaagactggcgcactcgatttctttaaatctttaaatgctggtgaattaaagaaagcagctcctgctgatcccagtgctcctttagtgaatgccgaaatcgcaagacaagttgaagccttgttaactcctaacactaccgttattgccgagactggtgatagttggttcaatgctcaacgcatgaaattacccaatggtgctcgtgttgagtatgaaatgcaatggggtcacattggatggtctgttcctgctgcatttggatatgcagttggagcacctgagcgtagaaacattttaatggtaggtgatggttctttccaactcactgctcaagaagttgcacaaatggtacgtttaaaattgcctgttattatctttctcattaacaactatggttacaccattgaagttatgattcatgatggtccttataataacattaagaattgggattacgcaggtttaatggaggtatttaacggtaatggtggatacgacagtggagcaggtaaaggattaaaagctaaaacaggaggtgagttagctgaagcaattaaagtagctttagccaatacagatggtcctaccttaatcgaatgtttcattggacgtgaagattgtactgaagagttagttaaatggggaaagcgtgttgccgctgcaaattctcgtaaacctgtaaacaaactcttgtagttaggatccagcaaggtttcatcccgaccccctcagggtcgggatttttttattgtgagctcagaaaaactattgacaaacccataaaaaatgtgatataattatagattgtcactggtattttatactagaggcaaattatatttatatatacaaaaatgctgtaggaggatcagccatatgattaaagcctacgctgccctggaagccaacggaaaactccaaccctttgaatacgaccccggtgccctgggtgctaatgaggtggagattgaggtgcagtattgtggggtgtgccacagtgatttgtccatgattaataacgaatggggcatttccaattaccccctagtgccgggtcatgaggtggtgggtactgtggccgccatgggcgaaggggtgaaccatgttgaggtgggggatttagtggggctgggttggcattcgggctactgcatgacctgccatagttgtttatctggctaccacaacctttgtgccacggcggaatcgaccattgtgggccactacggtggctttggcgatcgggttcgggccaagggagtcagcgtggtgaaattacctaaaggcattgacctagccagtgccgggccccttttctgtggaggaattaccgttttcagtcctatggtggaactgagtttaaagcccactgcaaaagtggcagtgatcggcattgggggcttgggccatttagcggtgcaatttctccgggcctggggctgtgaagtgactgcctttacctccagtgccaggaagcaaacggaagtgttggaattgggcgctcaccacatactagattccaccaatccagaggcgatcgccagtgcggaaggcaaatttgactatattatctccactgtgaacctgaagcttgactggaacttatacatcagcaccctggcgccccagggacatttccactttgttggggtggtgttggagcctttggatctaaatctttttccccttttgatgggacaacgctccgtttctgcctccccagtgggtagtcccgccaccattgccaccatgttggactttgctgtgcgccatgacattaaacccgtggtggaacaatttagctttgatcagatcaacgaggcgatcgcccatctagaaagcggcaaagcccattatcgggtagtgctcagccatagtaaaaattagctctgcaaaggttgcttctagatctgtggaacgcccggttgccaccgggcgttttttattcctgcaggatcatcttgctgaaaaactcgagcgctcgttccgcaaagcggtacggagttagttaggggctaatgggcattctcccgtacaggaaagagttagaagttattaattatcaacaattctcctttgcctagtgcatcgttacctttttaattaaaacataaggaaaactaataatcgtaataatttaacctcaaagtgtaaagaaatgtgaaattctgacttttataacgttaaagagggaaaaattagcagtttaaaatacctagagaatagtctggggtaagcatagagaattagattagttaagttaatcaaattcagaaaaaataataatcgtaaatagttaatctgggtgtatagaaaatgatccccttcatgataagatttaaactcgaaaagcaaaagccaaaaaactaacttccattaaaagaagttgttacatataacgctataaagaaaatttatatatttggaggataccaaccatgtctcatattcaacgtgaaactagttgttctcgccctcgtttaaattctaatatggatgccgatttatatggttataaatgggctcgtgataatgttggtcaatctggtgctactatttatcgtttatatggtaaacctgatgctcctgaattattcttgaaacatggtaaaggttctgttgctaatgatgttactgatgaaatggttcgtttaaactggttgactgaatttatgcctttacctactattaaacattttattcgtactcccgatgatgcttggttattaactactgctattcctggtaaaactgcttttcaagttttagaagaatatcctgattctggtgaaaatattgttgatgctttagctgtttttttacgtcgtttacattctattcccgtttgtaattgtccttttaattctgatcgtgtttttcgtttagctcaagctcaatctcgtatgaataatggtttagttgatgcttctgattttgatgatgaacgtaatggttggcctgttgaacaagtttggaaagaaatgcacaaattgttacctttttctcctgattctgttgttactcatggtgatttttctttagataatttgatctttgatgaaggtaaattgattggttgtattgatgttggtcgtgttggtattgctgatcgttatcaagatttagctattttatggaattgtttaggtgaattttctccttctttacagaaacgtttatttcagaaatatggtattgataatcctgatatgaacaagttacaatttcatttaatgttggacgagttcttttaagaattaattcatgaccaaaatcccttaacgtgagttttcgttccactgagcgtcagaccccgtagaaaagatcaaaggatcttcttgagatcctttttttctgcgcgtaatctgctgctatttaaattacgtacacgtgttattactttgttaacgacaattgtcttaattaactgggcctcatgggccttccgctcactgcccgctttccagtcgggaaacctgtcgtgccagctctgcagatgacggtgaaaacctctgacacatgcagctcccggagacggtcacagcttgtctgtaagcggatgccgggagcagacaagcccgtcagggcgcgtcagcgggtgttggcgggtgtcggggcgcagccatgacccagtcacgtagcgatagcggagtgtatactggcttaactatgcggcatcagagcagattgtactgagagtgcaccatatgcggtgtgaaataccgcacagatgcgtaaggagaaaataccgcatcaggcgctcttccgcttcctcgctcactgactcgctgcgctcggtcgttcggctgcggcgagcggtatcagctcactcaaaggcggtaatacggttatccacagaatcaggggataacgcaggaaagaacatgtgagcaaaaggccagcaaaaggccaggaaccgtaaaaaggccgcgttgctggcgtttttccataggctccgcccccctgacgagcatcacaaaaatcgacgctcaagtcagaggtggcgaaacccgacaggactataaagataccaggcgtttccccctggaagctccctcgtgcgctctcctgttccgaccctgccgcttaccggatacctgtccgcctttctcccttcgggaagcgtggcgctttctcatagctcacgctgtaggtatctcagttcggtgtaggtcgttcgctccaagctgggctgtgtgcacgaaccccccgttcagcccgaccgctgcgccttatccggtaactatcgtcttgagtccaacccggtaagacacgacttatcgccactggcagcagccactggtaacaggattagcagagcgaggtatgtaggcggtgctacagagttcttgaagtggtggcctaactacggctacactagaaggacagtatttggtatctgcgctctgctgaagccagttaccttcggaaaaagagttggtagctcttgatccggcaaacaaaccaccgctggtagcggtggtttttttgtttgcaagcagcagattacgcgcagaaaaaaaggatctcaagaagatcctttgatcttttctactgcagaagcttgttagacaccctgtcatgtattttatattatttatttcaccatacggattaagtgaaacctaatgaaaatagtactttcggagctttaactttaatgaaggtatgtttttttatagacatcgatgtctggtttaacaataggaaaaagtagctaaaactcccatgaattaaagaaataacaaggtgtctaacaacctgttattaagaatgttagaaaagacttaacatttgtgttgagtttttatagacattggtgtctagacatacggtagataaggtttgctcaaaaataaaataaaaaaagattggactaaaaaacatttaatttagtacaatttaattagttattttttcgtctcaaattttgctttgttgagcagaaatttagataaaaaaatccccgtgatcagattacaatgtcgttcattgtacgatgtgtcgaaaaatctttacgacactctaaactgaccacacgggggaaaaagaaaactgaactaataacatcatgatactcggaaaacctagcaattctcaacccctaaacaaaagaaacttccaaaaccctgaccatataaaggagtggcaacaatcagcaatcagtcaagatttgatagcagaaaatcttgtatcggttgctaatggttttgatgtactatttatcggcaataaataccgaactaacacgggtgttctgtcacggcacatattaaactcctattctcatttagaagatggtggttcgtatggtagaacatttgacccatttaccaataaagaaatgcagtgggttcaatttaaaccgaatagaccaagaaaaggttctactggtaaggtaatcaaatatgaatcgccaaaaggtgaacctacaagagttctaatgccgtttgtgcctatgaaaatatggcaacggattagcgataagttcggagtaccgattaatccgaaaaaagatactcacttttgggaatgggtaaagaataatccatcgataccgattgccattacagaaggaaataaaaaagctaattgcctattatcctatggctatcctgctattgcctttgtaggcatttggaacggattagagaaaataaatgatttctcgaaggaaaagcagttaaaagaggatttgaaatggttgttatccaacggcaaccgaaatattaatatcatctttgaccaagaccagaaacaaaaaactgtaattaatgtaaacaaagctattttcgctttatcttctctaataagtagaaatggtcataaagttaatattgtgcaatggttgccgtcaaaaggtaaaggaatagatgattatttggtagctttaccttttgagaaaagagaaaatcatttagacaacttaattaaaattgcaccatcatttaatttttggtcaactaaatacttattcaagtgtcgtaaaccagatttaaccgtaaattgccgttatttgagcgatgcagtaaaagaattacctcaagaggatatagcattaatagcacctcacggcacgggtaaaacttcattagtagctactcacgttaagaatcggagttatcacggaaggaaaactatttcattggtgcatcttgaaagtttagccaaagctaatggcaacgcacttggattatattaccgaaccgaaaataatattgaaaagcaatatcttggatttagcttatgtgtagatagttgccgtgataagattaacggcattacaactgatattatttcaggtcaagattattgccttttcattgatgaaattgaccaagtaattccacacatccttaacagtgaaactgaagtaagtaagtatagatgcaccatcattgacactttttctgaactggtgagaaatgctgaacaggtcattattgctgatgctgatttatccgatgtgacgattgacctaatagaaaacatcagaggtaaaaaactatatgtaatcaagaatgaatatcagtatcagggaatgacttttaacgccgttggttcaccattagaaatgatggcaatgatgggaaaatcggtgtcagaaggcaagaaattatttattaacaccacatcccaaaaggcaaaaagtaagtacggcacaatcgctcttgagtcttatatttttggtctaaataaagaagcaaagatattaagaatagactctgaaaccactaaaaaccctgaacatccagcctataaaatcattgaccaagacttaaataatatcctcaaagattatgattatgtcattgcctcaccttgccttcaaacaggtgtcagtattaccttaaaagggcattttgaccagcaatttaacttttccagtggaaacattacacctcattgctttttacagcaaatgtggcggttgagggatgcagaaattgaaagattctattatgtgccgaactcatctaacctcaatctcattgggaataagtcaagttcaccatcagaccttctaaagagcaataacaagatggcaacggcaacggttaaccttttgggtagaatcgactccgaatattccctagagtatgaatcgcacggcatttggcttgagacgtgggcaaaattatcagcacggcataacagttcaatgcgttgttactctgaaattcttacctatctaattacgtctcaagggcataaattaaatatcaacattccctcacctcttgcagatattaagaagctaaatgatgaggtaagtagtaacagggaaaaggtaaaaaatgagagatactctcagaggttaaactcaccagatattaacgatgcagaagctaccatactcgaatctaaagagcaaaaaatcggattgactctcaatgagagatgcaccctagaaaagcataaagttaagaagcggtatgggaatgtaaagatggatattctcacctttgatgatgatggactataccccaaactcagactattttattacctcaccatcggtaaacctcatctcaaggctaatgacagaaaagctattgccaaaatgggcaatgacaataaaggcaagattctatcaaaagacttagttaataaaacttactccgctcgtgtgaaggtcttagagattcttaaactaactgactttatcgacaatcttagagatgaactcttaataactcccaataatccagctatcaccgattttaataatcttctgctaagagctaagaaggatttaagagtattaggagtcaacatcggaaaatatccaatggccaacattaatgccgtacttactctcattggtcacaaactttctgtaatgagagatgagttcggaaaagagaaaaggataaaagtagatggtaaatcataccgatgttatcaacttgaaacattaccagattttaccaatgatactcttgactactggttagaaaatgatagccaaaaagaagtaacagcaacagaaaattactccgaaaattttaacccttcaaatagctacaatccagacagtaagacactttcagagggtgcaaatttcctatatataaataaagaagaattgcatccaaataaattgcacctagaaataaaagaaggtgctgaactttttttattcggggtaaaggtgattgtgaaaggaatcttggacggggcagtaactatattctctatgggtcaagaatacgatttatccctcaatgaactagaggggatgttaacatcatgaactttacaagaatctttttaaagggcgatcgcaccatgttaaatgatggtacatttgttcagatatttgatatttaccatgaccacgcattgggagtgacccttgaccttaagacagaaaaaattatttccgatgatgttagggtaattactgtcaaagacttattgttcgatggcacttataaaggggtaaaatcttttatgcccgataatgcccgataatgcccgattgatgctacaaaatcccataatcataagcgataatcccctaatagcttgtaattcttgaaccgtagcgattttagagtattccaaaaagaagaaataaacaccgcaaaatgtcgtatttcacatatataaaccaaggttttttgccctaaaatctttatgtttgtagtgtgatgttgggtcaaaatggtcagaaaagttgcaaggtttttatggatgcttacgcgcgcgaggggtaagcatccccaaatagttactttatcctagtccatgcccatttattgccgtcccgttcggctttaaaaaagtgccaaaactcacaaggtgcaataaaaagttctgtacctttcgcaaccctagataatctttcaacagttactttttttcctattatctcggtacaaagtttggctagtttctcttttccctctttttcaatcaagccttcttgtatgcccaactcattgattaatctctctatttttaccattatttcccgttcaggtagtttatcccctaaatcttcatcggggggcaatgtagggcattctgaaggggctttttcttctgtctggacattatctaatattgaagtaaccaaactatcttcagttttttctattcctattaattcatattcggttactgtatccgtatcaatatccgaataactatctttatccgtattagctattcggttaagtttatccgttaactcagaaacaagactatatagcggttttagcttttcttctatcctgttatctaatacggataagtttatacggttatcattatccgtattagtatcattgggcttttttggtagttctaccccctcataaaccgcttttattcccaattccaacagactgataacagtatcctttataatgggttttttgctgatatggtgaacttttgccccttccatcattgcgatactttctatctcactcatcaacttatcgcttaagtgaatctcgtatctgtttaatcccttactggttttattcatatccgtttactttattcggttaacaattctattttatacgaataaaatattatacggttaactttatacgtttaactattttatctatacggataacagtaataagttattcgtattagttatacgtttacttttatccaaataaaattagtgcatttaaactaaaagaatgattttatcggagttgatagcattggattaacctaaagatgtttataagctatatctgataagtatttaaggttattttgttattctgtttattgacattatcagaataaaagaatagaatataattgttgagagataagaggtttaagtgattatggttaagaagttagttggttatgtcagggtcagtagtgaatcgcaagaggataacactagcttacagaatcagatagagagaattgaagcatattgtatggcttttggttatgagttggtaaaaatattcaaagaggttgccactggtacaaaagcagatattgaaacccgtcctatttttaatgaagctatagaatacttgaaacaggataatgctaatggaattattgccttgaagctagaccgaatcgcacggaatgctttagatgtattgcgtttggttcgtgaaaccttagaaccacaaaataaaatgttagtgttactagatattcaggtagatacttcgacaccttcaggaaaaatgattttaactgtaatgagtgccgttgctgaactcgaaagagacatgatctatgatcgcactcaggggggtagaaagactaaagcccaaaagggcgggtatgcctacgggaaacctaaatttggctataagactgaagaaaaggaactaaaagaagattcagcacaacaggaaactattaaactaattaagagacaccgtaggtcagggaaaagctaccagaaaatagctgattatctcaatgcccaaagtattcccactaaacaaggtaagaaatggagttctagcgtcgtctatcgaatctgtcaggaaaaagctggttaagtctgtttatagatatttagaatttattgaataaaaatagtatgaacaataaatatttatggactaaccacgctcggaaacgtttaactgaacgatgggaaataaaagaatcatgggttattgataccatcgaaaatcctgaacgttcagaatttattgttgatgagtcaggggaaaaatatcattactataaaagaatagctaagtttaagaatagagtgttagaagtgataacttctgccaactcaacacccacaagaataataaccttttactttaaccgtaacatgaggaaaaatttatgattgttacttacgataatgaagttgacgcaatttattttaagttaacggaaaataaaattgatagcaccgaacctcaaacagacaggattatcattgattacgatgaaagtaataatattgttggcattgaggtattagattttaattatcttgtcaagaaaggtttaaccgttgctgatttacctttttctgaagatgaaagattaacagcttctcaatattttaattttcctgttgctatctaatccagaaggggcaataatccccttctttcatcgagttagacttaatatcacaaaagtcattttcattttaccgtttcttttccacagcgtccgtacgcccctcgttaaatctcaaaaccgacaatttatgatgtttataaaaagttactcactttaataagtatttatactcattaaagggttattctttttttgtagcctgataggttgggaaggaatatttcagattatcagatttgttgaatatttttcgtcagatacgcaaaccttacaaacataattaacaactgaaactattgatatgtctaggttttagctctatcacaggttggatctg

SEQ ID NO: 81 - DNA, 13085 bp, Cyanobacterium sp. ABICyano1
tcgacaattaataacttcttcctgtacgggcgaatggccatttgctcctaactaactccgtactgctttgcggaacgagcgtagcgaactctccgaattactaagccttcatccctgatagatgcaaaaaacgaattaaaattatgtgtaaaaagaaaatgtgtctttatttagtagtcaaagttacaaaatattaagaatcaaattaataatgtattgggcagttaagtatataagtctttaaatatttatttgtattcaatatattaaccgaggacaaattatgaattcttacactgttggaacctatttagcagaacgtttagttcaaattggtctcaaacaccattttgcagtagctggtgattataatttagttttattggataacttattgttaaataagaatatggaacaagtgtattgttgtaatgaattaaactgtggtttttctgctgagggatatgctcgtgcaaaaggtgctgccgcagcagttgttacttattctgttggagcattaagtgcttttgacgctattggaggtgcttatgcagaaaatttacctgtaatcttaatctctggtgcacccaataacaacgatcacgctgctggtcatgtattgcatcatgctttaggtaaaaccgattatcattaccaattagaaatggcaaaaaatattaccgctgccgcagaagctatttatactcccgaagaagcacctgctaagatcgatcacgtaattaaaaccgctctccgtgagaaaaaacccgtatatttagaaatcgcttgcaatatcgcttctatgccttgtgcagctcctggacctgctagtgctttatttaacgatgaagcatctgatgaggctagtttaaatgccgctgttgaagaaactttgaaatttattgctaatcgtgataaagtagctgttttagttggttctaaactccgtgccgctggtgcagaagaagcggctgtaaaattcgcagatgccttaggaggtgctgttgccacaatggcagccgctaaaagttttttccccgaagaaaatcctcattacattggtacttcttggggtgaggtatcttaccctggtgtagaaaaaaccatgaaggaagctgatgcagtaattgcattagctcctgttttcaatgattactctaccactggttggactgatattccagaccccaaaaaattagttttagcagaacctcgctctgtagttgtgaatggtgttagatttcccagtgtacatctcaaagattatttaactcgtttagctcaaaaagtgagtaaaaagactggcgcactcgatttctttaaatctttaaatgctggtgaattaaagaaagcagctcctgctgatcccagtgctcctttagtgaatgccgaaatcgcaagacaagttgaagccttgttaactcctaacactaccgttattgccgagactggtgatagttggttcaatgctcaacgcatgaaattacccaatggtgctcgtgttgagtatgaaatgcaatggggtcacattggatggtctgttcctgctgcatttggatatgcagttggagcacctgagcgtagaaacattttaatggtaggtgatggttctttccaactcactgctcaagaagttgcacaaatggtacgtttaaaattgcctgttattatctttctcattaacaactatggttacaccattgaagttatgattcatgatggtccttataataacattaagaattgggattacgcaggtttaatggaggtatttaacggtaatggtggatacgacagtggagcaggtaaaggattaaaagctaaaacaggaggtgagttagctgaagcaattaaagtagctttagccaatacagatggtcctaccttaatcgaatgtttcattggacgtgaagattgtactgaagagttagttaaatggggaaagcgtgttgccgctgcaaattctcgtaaacctgtaaacaaactcttgtagttaggatccagcaaggtttcatcccgaccccctcagggtcgggatttttttattgtgagctcaactttagatattcgtagttggcaatgtcgtaaatgcggaacaatacatggaaaacatatagatttgtaatgagaaaaagtgtaaacaaatattaagaaaaagatcagaaaaatttaacaacacgtaataaaaaaatgcgtcactacgggttataaatttacatgaaaggttaaaacacttttctgagacgattttgataaaaaagttgtcaaaaaattaagtttctttacaaatgcttaacaaaaacttggttttaagcacaaaataagagagactaatttgcagaagttttacaaggaaatcttgaagaaaaagatctaagtaaaacgactctgtttaaccaaaatttaacaaatttaacaaaacaaactaaatctattaggagattaactacatatgactaccgctactaaatttaaagcatacgccgcattaaattctggtgaaaaattacagccctgggaatacgaacctgaacctttacaggttgatgaggttgagatccgtgtaacccataacggtttatgtcatactgatttacacatgcgtgataatgattggaacgtaagtcaatatcctttagtacccggtcacgaagtagttggtgaggttaccgaggttggtgaaaaagtaaccagtttacacaaaggagacagaattggtgtaggatggattagaaattcttgtcgttcttgtgatcactgtttacaaggagaggaaaacatctgtcgtgaaggatacactggtttaattgttggacaccacggtggtttcgctgatcgtttacgtgtacctgctgatttcacctacaaaattcctgatgcattagattctgcctctgccgctcccttattatgtgctggtattactgtttatacccccttaagaacttacatcaaacaccccggtatgaaagttggtgtaatgggaattggtggtttaggtcatttagctattaaatttgctagagctatgggagctgaagtaactgcattttctacttctttaaacaaacaagaacaggcaaaagagtttggagcacacaattttcagcaatggggaactgctgaagagatgaaagctattgctggttctttcgatttagttttatctactatctctagtgaaactgattgggatgctgctttctctttattagctaacaatggtgtattatgttttgttggtattcctgtttctaccttaaatattcctttaatccctttaatctttggtcaaaaagctgtagtaggaagtattgttggtggaagacgttttatggctgagatgttagaatttgctgccgttaatcagatcaaacccatgattgagactatgcctttaagtcaaatcaacgaggctatggataaagttgcagctaatcaagcccgttatcgtattgtattattagcagactaactagatctacttctaaactgaaacaaatttgagggtaggcttcattgtctgcccttatttttttatttaggaaaagtgaacagactaaagagtgttggctctattgctttgagtatgtaaattaggcgttgctgaattaaggtatgatttttgacccctgcaggatcatcttgctgaaaaactcgagcgctcgttccgcaaagcggtacggagttagttaggggctaatgggcattctcccgtacaggaaagagttagaagttattaattatcaacaattctcctttgcctagtgcatcgttacctttttaattaaaacataaggaaaactaataatcgtaataatttaacctcaaagtgtaaagaaatgtgaaattctgacttttataacgttaaagagggaaaaattagcagtttaaaatacctagagaatagtctggggtaagcatagagaattagattagttaagttaatcaaattcagaaaaaataataatcgtaaatagttaatctgggtgtatagaaaatgatccccttcatgataagatttaaactcgaaaagcaaaagccaaaaaactaacttccattaaaagaagttgttacatataacgctataaagaaaatttatatatttggaggataccaaccatgtctcatattcaacgtgaaactagttgttctcgccctcgtttaaattctaatatggatgccgatttatatggttataaatgggctcgtgataatgttggtcaatctggtgctactatttatcgtttatatggtaaacctgatgctcctgaattattcttgaaacatggtaaaggttctgttgctaatgatgttactgatgaaatggttcgtttaaactggttgactgaatttatgcctttacctactattaaacattttattcgtactcccgatgatgcttggttattaactactgctattcctggtaaaactgcttttcaagttttagaagaatatcctgattctggtgaaaatattgttgatgctttagctgtttttttacgtcgtttacattctattcccgtttgtaattgtccttttaattctgatcgtgtttttcgtttagctcaagctcaatctcgtatgaataatggtttagttgatgcttctgattttgatgatgaacgtaatggttggcctgttgaacaagtttggaaagaaatgcacaaattgttacctttttctcctgattctgttgttactcatggtgatttttctttagataatttgatctttgatgaaggtaaattgattggttgtattgatgttggtcgtgttggtattgctgatcgttatcaagatttagctattttatggaattgtttaggtgaattttctccttctttacagaaacgtttatttcagaaatatggtattgataatcctgatatgaacaagttacaatttcatttaatgttggacgagttcttttaagaattaattcatgaccaaaatcccttaacgtgagttttcgttccactgagcgtcagaccccgtagaaaagatcaaaggatcttcttgagatcctttttttctgcgcgtaatctgctgctatttaaattacgtacacgtgttattactttgttaacgacaattgtcttaattaactgggcctcatgggccttccgctcactgcccgctttccagtcgggaaacctgtcgtgccagctctgcagatgacggtgaaaacctctgacacatgcagctcccggagacggtcacagcttgtctgtaagcggatgccgggagcagacaagcccgtcagggcgcgtcagcgggtgttggcgggtgtcggggcgcagccatgacccagtcacgtagcgatagcggagtgtatactggcttaactatgcggcatcagagcagattgtactgagagtgcaccatatgcggtgtgaaataccgcacagatgcgtaaggagaaaataccgcatcaggcgctcttccgcttcctcgctcactgactcgctgcgctcggtcgttcggctgcggcgagcggtatcagctcactcaaaggcggtaatacggttatccacagaatcaggggataacgcaggaaagaacatgtgagcaaaaggccagcaaaaggccaggaaccgtaaaaaggccgcgttgctggcgtttttccataggctccgcccccctgacgagcatcacaaaaatcgacgctcaagtcagaggtggcgaaacccgacaggactataaagataccaggcgtttccccctggaagctccctcgtgcgctctcctgttccgaccctgccgcttaccggatacctgtccgcctttctcccttcgggaagcgtggcgctttctcatagctcacgctgtaggtatctcagttcggtgtaggtcgttcgctccaagctgggctgtgtgcacgaaccccccgttcagcccgaccgctgcgccttatccggtaactatcgtcttgagtccaacccggtaagacacgacttatcgccactggcagcagccactggtaacaggattagcagagcgaggtatgtaggcggtgctacagagttcttgaagtggtggcctaactacggctacactagaaggacagtatttggtatctgcgctctgctgaagccagttaccttcggaaaaagagttggtagctcttgatccggcaaacaaaccaccgctggtagcggtggtttttttgtttgcaagcagcagattacgcgcagaaaaaaaggatctcaagaagatcctttgatcttttctactgcagaagcttgttagacaccctgtcatgtattttatattatttatttcaccatacggattaagtgaaacctaatgaaaatagtactttcggagctttaactttaatgaaggtatgtttttttatagacatcgatgtctggtttaacaataggaaaaagtagctaaaactcccatgaattaaagaaataacaaggtgtctaacaacctgttattaagaatgttagaaaagacttaacatttgtgttgagtttttatagacattggtgtctagacatacggtagataaggtttgctcaaaaataaaataaaaaaagattggactaaaaaacatttaatttagtacaatttaattagttattttttcgtctcaaattttgctttgttgagcagaaatttagataaaaaaatccccgtgatcagattacaatgtcgttcattgtacgatgtgtcgaaaaatctttacgacactctaaactgaccacacgggggaaaaagaaaactgaactaataacatcatgatactcggaaaacctagcaattctcaacccctaaacaaaagaaacttccaaaaccctgaccatataaaggagtggcaacaatcagcaatcagtcaagatttgatagcagaaaatcttgtatcggttgctaatggttttgatgtactatttatcggcaataaataccgaactaacacgggtgttctgtcacggcacatattaaactcctattctcatttagaagatggtggttcgtatggtagaacatttgacccatttaccaataaagaaatgcagtgggttcaatttaaaccgaatagaccaagaaaaggttctactggtaaggtaatcaaatatgaatcgccaaaaggtgaacctacaagagttctaatgccgtttgtgcctatgaaaatatggcaacggattagcgataagttcggagtaccgattaatccgaaaaaagatactcacttttgggaatgggtaaagaataatccatcgataccgattgccattacagaaggaaataaaaaagctaattgcctattatcctatggctatcctgctattgcctttgtaggcatttggaacggattagagaaaataaatgatttctcgaaggaaaagcagttaaaagaggatttgaaatggttgttatccaacggcaaccgaaatattaatatcatctttgaccaagaccagaaacaaaaaactgtaattaatgtaaacaaagctattttcgctttatcttctctaataagtagaaatggtcataaagttaatattgtgcaatggttgccgtcaaaaggtaaaggaatagatgattatttggtagctttaccttttgagaaaagagaaaatcatttagacaacttaattaaaattgcaccatcatttaatttttggtcaactaaatacttattcaagtgtcgtaaaccagatttaaccgtaaattgccgttatttgagcgatgcagtaaaagaattacctcaagaggatatagcattaatagcacctcacggcacgggtaaaacttcattagtagctactcacgttaagaatcggagttatcacggaaggaaaactatttcattggtgcatcttgaaagtttagccaaagctaatggcaacgcacttggattatattaccgaaccgaaaataatattgaaaagcaatatcttggatttagcttatgtgtagatagttgccgtgataagattaacggcattacaactgatattatttcaggtcaagattattgccttttcattgatgaaattgaccaagtaattccacacatccttaacagtgaaactgaagtaagtaagtatagatgcaccatcattgacactttttctgaactggtgagaaatgctgaacaggtcattattgctgatgctgatttatccgatgtgacgattgacctaatagaaaacatcagaggtaaaaaactatatgtaatcaagaatgaatatcagtatcagggaatgacttttaacgccgttggttcaccattagaaatgatggcaatgatgggaaaatcggtgtcagaaggcaagaaattatttattaacaccacatcccaaaaggcaaaaagtaagtacggcacaatcgctcttgagtcttatatttttggtctaaataaagaagcaaagatattaagaatagactctgaaaccactaaaaaccctgaacatccagcctataaaatcattgaccaagacttaaataatatcctcaaagattatgattatgtcattgcctcaccttgccttcaaacaggtgtcagtattaccttaaaagggcattttgaccagcaatttaacttttccagtggaaacattacacctcattgctttttacagcaaatgtggcggttgagggatgcagaaattgaaagattctattatgtgccgaactcatctaacctcaatctcattgggaataagtcaagttcaccatcagaccttctaaagagcaataacaagatggcaacggcaacggttaaccttttgggtagaatcgactccgaatattccctagagtatgaatcgcacggcatttggcttgagacgtgggcaaaattatcagcacggcataacagttcaatgcgttgttactctgaaattcttacctatctaattacgtctcaagggcataaattaaatatcaacattccctcacctcttgcagatattaagaagctaaatgatgaggtaagtagtaacagggaaaaggtaaaaaatgagagatactctcagaggttaaactcaccagatattaacgatgcagaagctaccatactcgaatctaaagagcaaaaaatcggattgactctcaatgagagatgcaccctagaaaagcataaagttaagaagcggtatgggaatgtaaagatggatattctcacctttgatgatgatggactataccccaaactcagactattttattacctcaccatcggtaaacctcatctcaaggctaatgacagaaaagctattgccaaaatgggcaatgacaataaaggcaagattctatcaaaagacttagttaataaaacttactccgctcgtgtgaaggtcttagagattcttaaactaactgactttatcgacaatcttagagatgaactcttaataactcccaataatccagctatcaccgattttaataatcttctgctaagagctaagaaggatttaagagtattaggagtcaacatcggaaaatatccaatggccaacattaatgccgtacttactctcattggtcacaaactttctgtaatgagagatgagttcggaaaagagaaaaggataaaagtagatggtaaatcataccgatgttatcaacttgaaacattaccagattttaccaatgatactcttgactactggttagaaaatgatagccaaaaagaagtaacagcaacagaaaattactccgaaaattttaacccttcaaatagctacaatccagacagtaagacactttcagagggtgcaaatttcctatatataaataaagaagaattgcatccaaataaattgcacctagaaataaaagaaggtgctgaactttttttattcggggtaaaggtgattgtgaaaggaatcttggacggggcagtaactatattctctatgggtcaagaatacgatttatccctcaatgaactagaggggatgttaacatcatgaactttacaagaatctttttaaagggcgatcgcaccatgttaaatgatggtacatttgttcagatatttgatatttaccatgaccacgcattgggagtgacccttgaccttaagacagaaaaaattatttccgatgatgttagggtaattactgtcaaagacttattgttcgatggcacttataaaggggtaaaatcttttatgcccgataatgcccgataatgcccgattgatgctacaaaatcccataatcataagcgataatcccctaatagcttgtaattcttgaaccgtagcgattttagagtattccaaaaagaagaaataaacaccgcaaaatgtcgtatttcacatatataaaccaaggttttttgccctaaaatctttatgtttgtagtgtgatgttgggtcaaaatggtcagaaaagttgcaaggtttttatggatgcttacgcgcgcgaggggtaagcatccccaaatagttactttatcctagtccatgcccatttattgccgtcccgttcggctttaaaaaagtgccaaaactcacaaggtgcaataaaaagttctgtacctttcgcaaccctagataatctttcaacagttactttttttcctattatctcggtacaaagtttggctagtttctcttttccctctttttcaatcaagccttcttgtatgcccaactcattgattaatctctctatttttaccattatttcccgttcaggtagtttatcccctaaatcttcatcggggggcaatgtagggcattctgaaggggctttttcttctgtctggacattatctaatattgaagtaaccaaactatcttcagttttttctattcctattaattcatattcggttactgtatccgtatcaatatccgaataactatctttatccgtattagctattcggttaagtttatccgttaactcagaaacaagactatatagcggttttagcttttcttctatcctgttatctaatacggataagtttatacggttatcattatccgtattagtatcattgggcttttttggtagttctaccccctcataaaccgcttttattcccaattccaacagactgataacagtatcctttataatgggttttttgctgatatggtgaacttttgccccttccatcattgcgatactttctatctcactcatcaacttatcgcttaagtgaatctcgtatctgtttaatcccttactggttttattcatatccgtttactttattcggttaacaattctattttatacgaataaaatattatacggttaactttatacgtttaactattttatctatacggataacagtaataagttattcgtattagttatacgtttacttttatccaaataaaattagtgcatttaaactaaaagaatgattttatcggagttgatagcattggattaacctaaagatgtttataagctatatctgataagtatttaaggttattttgttattctgtttattgacattatcagaataaaagaatagaatataattgttgagagataagaggtttaagtgattatggttaagaagttagttggttatgtcagggtcagtagtgaatcgcaagaggataacactagcttacagaatcagatagagagaattgaagcatattgtatggcttttggttatgagttggtaaaaatattcaaagaggttgccactggtacaaaagcagatattgaaacccgtcctatttttaatgaagctatagaatacttgaaacaggataatgctaatggaattattgccttgaagctagaccgaatcgcacggaatgctttagatgtattgcgtttggttcgtgaaaccttagaaccacaaaataaaatgttagtgttactagatattcaggtagatacttcgacaccttcaggaaaaatgattttaactgtaatgagtgccgttgctgaactcgaaagagacatgatctatgatcgcactcaggggggtagaaagactaaagcccaaaagggcgggtatgcctacgggaaacctaaatttggctataagactgaagaaaaggaactaaaagaagattcagcacaacaggaaactattaaactaattaagagacaccgtaggtcagggaaaagctaccagaaaatagctgattatctcaatgcccaaagtattcccactaaacaaggtaagaaatggagttctagcgtcgtctatcgaatctgtcaggaaaaagctggttaagtctgtttatagatatttagaatttattgaataaaaatagtatgaacaataaatatttatggactaaccacgctcggaaacgtttaactgaacgatgggaaataaaagaatcatgggttattgataccatcgaaaatcctgaacgttcagaatttattgttgatgagtcaggggaaaaatatcattactataaaagaatagctaagtttaagaatagagtgttagaagtgataacttctgccaactcaacacccacaagaataataaccttttactttaaccgtaacatgaggaaaaatttatgattgttacttacgataatgaagttgacgcaatttattttaagttaacggaaaataaaattgatagcaccgaacctcaaacagacaggattatcattgattacgatgaaagtaataatattgttggcattgaggtattagattttaattatcttgtcaagaaaggtttaaccgttgctgatttacctttttctgaagatgaaagattaacagcttctcaatattttaattttcctgttgctatctaatccagaaggggcaataatccccttctttcatcgagttagacttaatatcacaaaagtcattttcattttaccgtttcttttccacagcgtccgtacgcccctcgttaaatctcaaaaccgacaatttatgatgtttataaaaagttactcactttaataagtatttatactcattaaagggttattctttttttgtagcctgataggttgggaaggaatatttcagattatcagatttgttgaatatttttcgtcagatacgcaaaccttacaaacataattaacaactgaaactattgatatgtctaggttttagctctatcacaggttggatctg

SEQ ID NO: 82 - DNA, 13082 bp, Cyanobacterium sp. ABICyano1
tcgacaattaataacttcttcctgtacgggcgaatggccatttgctcctaactaactccgtactgctttgcggaacgagcgtagcgaactctccgaattactaagccttcatccctgatagatgcaaaaaacgaattaaaattatgtgtaaaaagaaaatgtgtctttatttagtagtcaaagttacaaaatattaagaatcaaattaataatgtattgggcagttaagtatataagtctttaaatatttatttgtattcaatatattaaccgaggacaaattatgaattcttacactgttggaacctatttagcagaacgtttagttcaaattggtctcaaacaccattttgcagtagctggtgattataatttagttttattggataacttattgttaaataagaatatggaacaagtgtattgttgtaatgaattaaactgtggtttttctgctgagggatatgctcgtgcaaaaggtgctgccgcagcagttgttacttattctgttggagcattaagtgcttttgacgctattggaggtgcttatgcagaaaatttacctgtaatcttaatctctggtgcacccaataacaacgatcacgctgctggtcatgtattgcatcatgctttaggtaaaaccgattatcattaccaattagaaatggcaaaaaatattaccgctgccgcagaagctatttatactcccgaagaagcacctgctaagatcgatcacgtaattaaaaccgctctccgtgagaaaaaacccgtatatttagaaatcgcttgcaatatcgcttctatgccttgtgcagctcctggacctgctagtgctttatttaacgatgaagcatctgatgaggctagtttaaatgccgctgttgaagaaactttgaaatttattgctaatcgtgataaagtagctgttttagttggttctaaactccgtgccgctggtgcagaagaagcggctgtaaaattcgcagatgccttaggaggtgctgttgccacaatggcagccgctaaaagttttttccccgaagaaaatcctcattacattggtacttcttggggtgaggtatcttaccctggtgtagaaaaaaccatgaaggaagctgatgcagtaattgcattagctcctgttttcaatgattactctaccactggttggactgatattccagaccccaaaaaattagttttagcagaacctcgctctgtagttgtgaatggtgttagatttcccagtgtacatctcaaagattatttaactcgtttagctcaaaaagtgagtaaaaagactggcgcactcgatttctttaaatctttaaatgctggtgaattaaagaaagcagctcctgctgatcccagtgctcctttagtgaatgccgaaatcgcaagacaagttgaagccttgttaactcctaacactaccgttattgccgagactggtgatagttggttcaatgctcaacgcatgaaattacccaatggtgctcgtgttgagtatgaaatgcaatggggtcacattggatggtctgttcctgctgcatttggatatgcagttggagcacctgagcgtagaaacattttaatggtaggtgatggttctttccaactcactgctcaagaagttgcacaaatggtacgtttaaaattgcctgttattatctttctcattaacaactatggttacaccattgaagttatgattcatgatggtccttataataacattaagaattgggattacgcaggtttaatggaggtatttaacggtaatggtggatacgacagtggagcaggtaaaggattaaaagctaaaacaggaggtgagttagctgaagcaattaaagtagctttagccaatacagatggtcctaccttaatcgaatgtttcattggacgtgaagattgtactgaagagttagttaaatggggaaagcgtgttgccgctgcaaattctcgtaaacctgtaaacaaactcttgtagttaggatccagcaaggtttcatcccgaccccctcagggtcgggatttttttattgtgagctcaactttagatattcgtagttggcaatgtcgtaaatgcggaacaatacatggaaaacatatagatttgtaatgagaaaaagtgtaaacaaatattaagaaaaagatcagaaaaatttaacaacacgtaataaaaaaatgcgtcactacgggttataaatttacatgaaaggttaaaacacttttctgagacgattttgataaaaaagttgtcaaaaaattaagtttctttacaaatgcttaacaaaaacttggttttaagcacaaaataagagagactaatttgcagaagttttacaaggaaatcttgaagaaaaagatctaagtaaaacgactctgtttaaccaaaatttaacaaatttaacaaaacaaactaaatctattaggagattaactacatatgagtgaaactaaatttaaagcctatgccgtaatgaatcctggtgaaaaattacaaccctgggaatatgaacctgctcctttacaggtagatgaaattgaagtaagagttactcacaatggtttatgtcacactgacttacacatgagagataatgactggaatgttagtgagttccccttagtagcaggtcatgaagttgttggtgaagtaaccgctgttggtgaaaaagtaaccagtcgtaaaaaaggtgatagagttggtgtaggttggattcgtaattcttgtcgcgcttgtgaccattgtttacaaggagaagagaacatttgtagagagggttatactggtttaattgttggtcatcacggtggatttgctgatcgtgtacgtgtacctgctgacttcacttataaaattcctgatgctttagatagtgcatctgctgctcctttattatgtgccggtattaccgtttacactcctttaagaacctacattaaacatcccggtatgaaagtaggtgttatgggtattggaggattaggacatttagctattaaatttgctcgtgcaatgggagcagaagttactgcctttagtaccagtcctaataaagaagcccaagccaaagaatttggtgctcatcatttccaacaatggggtactgctgaagaaatgaaagctgttgccggtaattttgatttagttttatctaccatctctgctgaaactgactgggatgctgccttctctttattagcaaataacggtgttttatgtttcgtaggtattcccgttagttctttaaatgttcctttaattcctttaattttcggacaaaaatctgttgtaggttctgtagttggaggaagaagattcatggcagaaatgttagagttcgccgctgtaaatcagattaaacctatgatcgaaactatgcccttatctcaagtaaatgaagctatggataaagttgccgccaataaagccagatatagaattgtattattatctgaataactagatctacttctaaactgaaacaaatttgagggtaggcttcattgtctgcccttatttttttatttaggaaaagtgaacagactaaagagtgttggctctattgctttgagtatgtaaattaggcgttgctgaattaaggtatgatttttgacccctgcaggatcatcttgctgaaaaactcgagcgctcgttccgcaaagcggtacggagttagttaggggctaatgggcattctcccgtacaggaaagagttagaagttattaattatcaacaattctcctttgcctagtgcatcgttacctttttaattaaaacataaggaaaactaataatcgtaataatttaacctcaaagtgtaaagaaatgtgaaattctgacttttataacgttaaagagggaaaaattagcagtttaaaatacctagagaatagtctggggtaagcatagagaattagattagttaagttaatcaaattcagaaaaaataataatcgtaaatagttaatctgggtgtatagaaaatgatccccttcatgataagatttaaactcgaaaagcaaaagccaaaaaactaacttccattaaaagaagttgttacatataacgctataaagaaaatttatatatttggaggataccaaccatgtctcatattcaacgtgaaactagttgttctcgccctcgtttaaattctaatatggatgccgatttatatggttataaatgggctcgtgataatgttggtcaatctggtgctactatttatcgtttatatggtaaacctgatgctcctgaattattcttgaaacatggtaaaggttctgttgctaatgatgttactgatgaaatggttcgtttaaactggttgactgaatttatgcctttacctactattaaacattttattcgtactcccgatgatgcttggttattaactactgctattcctggtaaaactgcttttcaagttttagaagaatatcctgattctggtgaaaatattgttgatgctttagctgtttttttacgtcgtttacattctattcccgtttgtaattgtccttttaattctgatcgtgtttttcgtttagctcaagctcaatctcgtatgaataatggtttagttgatgcttctgattttgatgatgaacgtaatggttggcctgttgaacaagtttggaaagaaatgcacaaattgttacctttttctcctgattctgttgttactcatggtgatttttctttagataatttgatctttgatgaaggtaaattgattggttgtattgatgttggtcgtgttggtattgctgatcgttatcaagatttagctattttatggaattgtttaggtgaattttctccttctttacagaaacgtttatttcagaaatatggtattgataatcctgatatgaacaagttacaatttcatttaatgttggacgagttcttttaagaattaattcatgaccaaaatcccttaacgtgagttttcgttccactgagcgtcagaccccgtagaaaagatcaaaggatcttcttgagatcctttttttctgcgcgtaatctgctgctatttaaattacgtacacgtgttattactttgttaacgacaattgtcttaattaactgggcctcatgggccttccgctcactgcccgctttccagtcgggaaacctgtcgtgccagctctgcagatgacggtgaaaacctctgacacatgcagctcccggagacggtcacagcttgtctgtaagcggatgccgggagcagacaagcccgtcagggcgcgtcagcgggtgttggcgggtgtcggggcgcagccatgacccagtcacgtagcgatagcggagtgtatactggcttaactatgcggcatcagagcagattgtactgagagtgcaccatatgcggtgtgaaataccgcacagatgcgtaaggagaaaataccgcatcaggcgctcttccgcttcctcgctcactgactcgctgcgctcggtcgttcggctgcggcgagcggtatcagctcactcaaaggcggtaatacggttatccacagaatcaggggataacgcaggaaagaacatgtgagcaaaaggccagcaaaaggccaggaaccgtaaaaaggccgcgttgctggcgtttttccataggctccgcccccctgacgagcatcacaaaaatcgacgctcaagtcagaggtggcgaaacccgacaggactataaagataccaggcgtttccccctggaagctccctcgtgcgctctcctgttccgaccctgccgcttaccggatacctgtccgcctttctcccttcgggaagcgtggcgctttctcatagctcacgctgtaggtatctcagttcggtgtaggtcgttcgctccaagctgggctgtgtgcacgaaccccccgttcagcccgaccgctgcgccttatccggtaactatcgtcttgagtccaacccggtaagacacgacttatcgccactggcagcagccactggtaacaggattagcagagcgaggtatgtaggcggtgctacagagttcttgaagtggtggcctaactacggctacactagaaggacagtatttggtatctgcgctctgctgaagccagttaccttcggaaaaagagttggtagctcttgatccggcaaacaaaccaccgctggtagcggtggtttttttgtttgcaagcagcagattacgcgcagaaaaaaaggatctcaagaagatcctttgatcttttctactgcagaagcttgttagacaccctgtcatgtattttatattatttatttcaccatacggattaagtgaaacctaatgaaaatagtactttcggagctttaactttaatgaaggtatgtttttttatagacatcgatgtctggtttaacaataggaaaaagtagctaaaactcccatgaattaaagaaataacaaggtgtctaacaacctgttattaagaatgttagaaaagacttaacatttgtgttgagtttttatagacattggtgtctagacatacggtagataaggtttgctcaaaaataaaataaaaaaagattggactaaaaaacatttaatttagtacaatttaattagttattttttcgtctcaaattttgctttgttgagcagaaatttagataaaaaaatccccgtgatcagattacaatgtcgttcattgtacgatgtgtcgaaaaatctttacgacactctaaactgaccacacgggggaaaaagaaaactgaactaataacatcatgatactcggaaaacctagcaattctcaacccctaaacaaaagaaacttccaaaaccctgaccatataaaggagtggcaacaatcagcaatcagtcaagatttgatagcagaaaatcttgtatcggttgctaatggttttgatgtactatttatcggcaataaataccgaactaacacgggtgttctgtcacggcacatattaaactcctattctcatttagaagatggtggttcgtatggtagaacatttgacccatttaccaataaagaaatgcagtgggttcaatttaaaccgaatagaccaagaaaaggttctactggtaaggtaatcaaatatgaatcgccaaaaggtgaacctacaagagttctaatgccgtttgtgcctatgaaaatatggcaacggattagcgataagttcggagtaccgattaatccgaaaaaagatactcacttttgggaatgggtaaagaataatccatcgataccgattgccattacagaaggaaataaaaaagctaattgcctattatcctatggctatcctgctattgcctttgtaggcatttggaacggattagagaaaataaatgatttctcgaaggaaaagcagttaaaagaggatttgaaatggttgttatccaacggcaaccgaaatattaatatcatctttgaccaagaccagaaacaaaaaactgtaattaatgtaaacaaagctattttcgctttatcttctctaataagtagaaatggtcataaagttaatattgtgcaatggttgccgtcaaaaggtaaaggaatagatgattatttggtagctttaccttttgagaaaagagaaaatcatttagacaacttaattaaaattgcaccatcatttaatttttggtcaactaaatacttattcaagtgtcgtaaaccagatttaaccgtaaattgccgttatttgagcgatgcagtaaaagaattacctcaagaggatatagcattaatagcacctcacggcacgggtaaaacttcattagtagctactcacgttaagaatcggagttatcacggaaggaaaactatttcattggtgcatcttgaaagtttagccaaagctaatggcaacgcacttggattatattaccgaaccgaaaataatattgaaaagcaatatcttggatttagcttatgtgtagatagttgccgtgataagattaacggcattacaactgatattatttcaggtcaagattattgccttttcattgatgaaattgaccaagtaattccacacatccttaacagtgaaactgaagtaagtaagtatagatgcaccatcattgacactttttctgaactggtgagaaatgctgaacaggtcattattgctgatgctgatttatccgatgtgacgattgacctaatagaaaacatcagaggtaaaaaactatatgtaatcaagaatgaatatcagtatcagggaatgacttttaacgccgttggttcaccattagaaatgatggcaatgatgggaaaatcggtgtcagaaggcaagaaattatttattaacaccacatcccaaaaggcaaaaagtaagtacggcacaatcgctcttgagtcttatatttttggtctaaataaagaagcaaagatattaagaatagactctgaaaccactaaaaaccctgaacatccagcctataaaatcattgaccaagacttaaataatatcctcaaagattatgattatgtcattgcctcaccttgccttcaaacaggtgtcagtattaccttaaaagggcattttgaccagcaatttaacttttccagtggaaacattacacctcattgctttttacagcaaatgtggcggttgagggatgcagaaattgaaagattctattatgtgccgaactcatctaacctcaatctcattgggaataagtcaagttcaccatcagaccttctaaagagcaataacaagatggcaacggcaacggttaaccttttgggtagaatcgactccgaatattccctagagtatgaatcgcacggcatttggcttgagacgtgggcaaaattatcagcacggcataacagttcaatgcgttgttactctgaaattcttacctatctaattacgtctcaagggcataaattaaatatcaacattccctcacctcttgcagatattaagaagctaaatgatgaggtaagtagtaacagggaaaaggtaaaaaatgagagatactctcagaggttaaactcaccagatattaacgatgcagaagctaccatactcgaatctaaagagcaaaaaatcggattgactctcaatgagagatgcaccctagaaaagcataaagttaagaagcggtatgggaatgtaaagatggatattctcacctttgatgatgatggactataccccaaactcagactattttattacctcaccatcggtaaacctcatctcaaggctaatgacagaaaagctattgccaaaatgggcaatgacaataaaggcaagattctatcaaaagacttagttaataaaacttactccgctcgtgtgaaggtcttagagattcttaaactaactgactttatcgacaatcttagagatgaactcttaataactcccaataatccagctatcaccgattttaataatcttctgctaagagctaagaaggatttaagagtattaggagtcaacatcggaaaatatccaatggccaacattaatgccgtacttactctcattggtcacaaactttctgtaatgagagatgagttcggaaaagagaaaaggataaaagtagatggtaaatcataccgatgttatcaacttgaaacattaccagattttaccaatgatactcttgactactggttagaaaatgatagccaaaaagaagtaacagcaacagaaaattactccgaaaattttaacccttcaaatagctacaatccagacagtaagacactttcagagggtgcaaatttcctatatataaataaagaagaattgcatccaaataaattgcacctagaaataaaagaaggtgctgaactttttttattcggggtaaaggtgattgtgaaaggaatcttggacggggcagtaactatattctctatgggtcaagaatacgatttatccctcaatgaactagaggggatgttaacatcatgaactttacaagaatctttttaaagggcgatcgcaccatgttaaatgatggtacatttgttcagatatttgatatttaccatgaccacgcattgggagtgacccttgaccttaagacagaaaaaattatttccgatgatgttagggtaattactgtcaaagacttattgttcgatggcacttataaaggggtaaaatcttttatgcccgataatgcccgataatgcccgattgatgctacaaaatcccataatcataagcgataatcccctaatagcttgtaattcttgaaccgtagcgattttagagtattccaaaaagaagaaataaacaccgcaaaatgtcgtatttcacatatataaaccaaggttttttgccctaaaatctttatgtttgtagtgtgatgttgggtcaaaatggtcagaaaagttgcaaggtttttatggatgcttacgcgcgcgaggggtaagcatccccaaatagttactttatcctagtccatgcccatttattgccgtcccgttcggctttaaaaaagtgccaaaactcacaaggtgcaataaaaagttctgtacctttcgcaaccctagataatctttcaacagttactttttttcctattatctcggtacaaagtttggctagtttctcttttccctctttttcaatcaagccttcttgtatgcccaactcattgattaatctctctatttttaccattatttcccgttcaggtagtttatcccctaaatcttcatcggggggcaatgtagggcattctgaaggggctttttcttctgtctggacattatctaatattgaagtaaccaaactatcttcagttttttctattcctattaattcatattcggttactgtatccgtatcaatatccgaataactatctttatccgtattagctattcggttaagtttatccgttaactcagaaacaagactatatagcggttttagcttttcttctatcctgttatctaatacggataagtttatacggttatcattatccgtattagtatcattgggcttttttggtagttctaccccctcataaaccgcttttattcccaattccaacagactgataacagtatcctttataatgggttttttgctgatatggtgaacttttgccccttccatcattgcgatactttctatctcactcatcaacttatcgcttaagtgaatctcgtatctgtttaatcccttactggttttattcatatccgtttactttattcggttaacaattctattttatacgaataaaatattatacggttaactttatacgtttaactattttatctatacggataacagtaataagttattcgtattagttatacgtttacttttatccaaataaaattagtgcatttaaactaaaagaatgattttatcggagttgatagcattggattaacctaaagatgtttataagctatatctgataagtatttaaggttattttgttattctgtttattgacattatcagaataaaagaatagaatataattgttgagagataagaggtttaagtgattatggttaagaagttagttggttatgtcagggtcagtagtgaatcgcaagaggataacactagcttacagaatcagatagagagaattgaagcatattgtatggcttttggttatgagttggtaaaaatattcaaagaggttgccactggtacaaaagcagatattgaaacccgtcctatttttaatgaagctatagaatacttgaaacaggataatgctaatggaattattgccttgaagctagaccgaatcgcacggaatgctttagatgtattgcgtttggttcgtgaaaccttagaaccacaaaataaaatgttagtgttactagatattcaggtagatacttcgacaccttcaggaaaaatgattttaactgtaatgagtgccgttgctgaactcgaaagagacatgatctatgatcgcactcaggggggtagaaagactaaagcccaaaagggcgggtatgcctacgggaaacctaaatttggctataagactgaagaaaaggaactaaaagaagattcagcacaacaggaaactattaaactaattaagagacaccgtaggtcagggaaaagctaccagaaaatagctgattatctcaatgcccaaagtattcccactaaacaaggtaagaaatggagttctagcgtcgtctatcgaatctgtcaggaaaaagctggttaagtctgtttatagatatttagaatttattgaataaaaatagtatgaacaataaatatttatggactaaccacgctcggaaacgtttaactgaacgatgggaaataaaagaatcatgggttattgataccatcgaaaatcctgaacgttcagaatttattgttgatgagtcaggggaaaaatatcattactataaaagaatagctaagtttaagaatagagtgttagaagtgataacttctgccaactcaacacccacaagaataataaccttttactttaaccgtaacatgaggaaaaatttatgattgttacttacgataatgaagttgacgcaatttattttaagttaacggaaaataaaattgatagcaccgaacctcaaacagacaggattatcattgattacgatgaaagtaataatattgttggcattgaggtattagattttaattatcttgtcaagaaaggtttaaccgttgctgatttacctttttctgaagatgaaagattaacagcttctcaatattttaattttcctgttgctatctaatccagaaggggcaataatccccttctttcatcgagttagacttaatatcacaaaagtcattttcattttaccgtttcttttccacagcgtccgtacgcccctcgttaaatctcaaaaccgacaatttatgatgtttataaaaagttactcactttaataagtatttatactcattaaagggttattctttttttgtagcctgataggttgggaaggaatatttcagattatcagatttgttgaatatttttcgtcagatacgcaaaccttacaaacataattaacaactgaaactattgatatgtctaggttttagctctatcacaggttggatctg

SEQ ID NO: 83 - DNA, 13090 bp, Cyanobacterium sp. ABICyano1
tcgacaattaataacttcttcctgtacgggcgaatggccatttgctcctaactaactccgtactgctttgcggaacgagcgtagcgaactctccgaattactaagccttcatccctgatagatgcaaaaaacgaattaaaattatgtgtaaaaagaaaatgtgtctttatttagtagtcaaagttacaaaatattaagaatcaaattaataatgtattgggcagttaagtatataagtctttaaatatttatttgtattcaatatattaaccgaggacaaattatgaattcttacactgttggaacctatttagcagaacgtttagttcaaattggtctcaaacaccattttgcagtagctggtgattataatttagttttattggataacttattgttaaataagaatatggaacaagtgtattgttgtaatgaattaaactgtggtttttctgctgagggatatgctcgtgcaaaaggtgctgccgcagcagttgttacttattctgttggagcattaagtgcttttgacgctattggaggtgcttatgcagaaaatttacctgtaatcttaatctctggtgcacccaataacaacgatcacgctgctggtcatgtattgcatcatgctttaggtaaaaccgattatcattaccaattagaaatggcaaaaaatattaccgctgccgcagaagctatttatactcccgaagaagcacctgctaagatcgatcacgtaattaaaaccgctctccgtgagaaaaaacccgtatatttagaaatcgcttgcaatatcgcttctatgccttgtgcagctcctggacctgctagtgctttatttaacgatgaagcatctgatgaggctagtttaaatgccgctgttgaagaaactttgaaatttattgctaatcgtgataaagtagctgttttagttggttctaaactccgtgccgctggtgcagaagaagcggctgtaaaattcgcagatgccttaggaggtgctgttgccacaatggcagccgctaaaagttttttccccgaagaaaatcctcattacattggtacttcttggggtgaggtatcttaccctggtgtagaaaaaaccatgaaggaagctgatgcagtaattgcattagctcctgttttcaatgattactctaccactggttggactgatattccagaccccaaaaaattagttttagcagaacctcgctctgtagttgtgaatggtgttagatttcccagtgtacatctcaaagattatttaactcgtttagctcaaaaagtgagtaaaaagactggcgcactcgatttctttaaatctttaaatgctggtgaattaaagaaagcagctcctgctgatcccagtgctcctttagtgaatgccgaaatcgcaagacaagttgaagccttgttaactcctaacactaccgttattgccgagactggtgatagttggttcaatgctcaacgcatgaaattacccaatggtgctcgtgttgagtatgaaatgcaatggggtcacattggatggtctgttcctgctgcatttggatatgcagttggagcacctgagcgtagaaacattttaatggtaggtgatggttctttccaactcactgctcaagaagttgcacaaatggtacgtttaaaattgcctgttattatctttctcattaacaactatggttacaccattgaagttatgattcatgatggtccttataataacattaagaattgggattacgcaggtttaatggaggtatttaacggtaatggtggatacgacagtggagcaggtaaaggattaaaagctaaaacaggaggtgagttagctgaagcaattaaagtagctttagccaatacagatggtcctaccttaatcgaatgtttcattggacgtgaagattgtactgaagagttagttaaatggggaaagcgtgttgccgctgcaaattctcgtaaacctgtaaacaaactcttgtagttaggatccagcaaggtttcatcccgaccccctcagggtcgggatttttttattgtgagctcaactttagatattcgtagttggcaatgtcgtaaatgcggaacaatacatggaaaacatatagatttgtaatgagaaaaagtgtaaacaaatattaagaaaaagatcagaaaaatttaacaacacgtaataaaaaaatgcgtcactacgggttataaatttacatgaaaggttaaaacacttttctgagacgattttgataaaaaagttgtcaaaaaattaagtttctttacaaatgcttaacaaaaacttggttttaagcacaaaataagagagactaatttgcagaagttttacaaggaaatcttgaagaaaaagatctaagtaaaacgactctgtttaaccaaaatttaacaaatttaacaaaacaaactaaatctattaggagattaactacatatgattaaagcctacgctgccctggaagccaacggaaaactccaaccctttgaatacgaccccggtgccctgggtgctaatgaggtggagattgaggtgcagtattgtggggtgtgccacagtgatttgtccatgattaataacgaatggggcatttccaattaccccctagtgccgggtcatgaggtggtgggtactgtggccgccatgggcgaaggggtgaaccatgttgaggtgggggatttagtggggctgggttggcattcgggctactgcatgacctgccatagttgtttatctggctaccacaacctttgtgccacggcggaatcgaccattgtgggccactacggtggctttggcgatcgggttcgggccaagggagtcagcgtggtgaaattacctaaaggcattgacctagccagtgccgggccccttttctgtggaggaattaccgttttcagtcctatggtggaactgagtttaaagcccactgcaaaagtggcagtgatcggcattgggggcttgggccatttagcggtgcaatttctccgggcctggggctgtgaagtgactgcctttacctccagtgccaggaagcaaacggaagtgttggaattgggcgctcaccacatactagattccaccaatccagaggcgatcgccagtgcggaaggcaaatttgactatattatctccactgtgaacctgaagcttgactggaacttatacatcagcaccctggcgccccagggacatttccactttgttggggtggtgttggagcctttggatctaaatctttttccccttttgatgggacaacgctccgtttctgcctccccagtgggtagtcccgccaccattgccaccatgttggactttgctgtgcgccatgacattaaacccgtggtggaacaatttagctttgatcagatcaacgaggcgatcgcccatctagaaagcggcaaagcccattatcgggtagtgctcagccatagtaaaaattagctctgcaaaggttgcttctagatctacttctaaactgaaacaaatttgagggtaggcttcattgtctgcccttatttttttatttaggaaaagtgaacagactaaagagtgttggctctattgctttgagtatgtaaattaggcgttgctgaattaaggtatgatttttgacccctgcaggatcatcttgctgaaaaactcgagcgctcgttccgcaaagcggtacggagttagttaggggctaatgggcattctcccgtacaggaaagagttagaagttattaattatcaacaattctcctttgcctagtgcatcgttacctttttaattaaaacataaggaaaactaataatcgtaataatttaacctcaaagtgtaaagaaatgtgaaattctgacttttataacgttaaagagggaaaaattagcagtttaaaatacctagagaatagtctggggtaagcatagagaattagattagttaagttaatcaaattcagaaaaaataataatcgtaaatagttaatctgggtgtatagaaaatgatccccttcatgataagatttaaactcgaaaagcaaaagccaaaaaactaacttccattaaaagaagttgttacatataacgctataaagaaaatttatatatttggaggataccaaccatgtctcatattcaacgtgaaactagttgttctcgccctcgtttaaattctaatatggatgccgatttatatggttataaatgggctcgtgataatgttggtcaatctggtgctactatttatcgtttatatggtaaacctgatgctcctgaattattcttgaaacatggtaaaggttctgttgctaatgatgttactgatgaaatggttcgtttaaactggttgactgaatttatgcctttacctactattaaacattttattcgtactcccgatgatgcttggttattaactactgctattcctggtaaaactgcttttcaagttttagaagaatatcctgattctggtgaaaatattgttgatgctttagctgtttttttacgtcgtttacattctattcccgtttgtaattgtccttttaattctgatcgtgtttttcgtttagctcaagctcaatctcgtatgaataatggtttagttgatgcttctgattttgatgatgaacgtaatggttggcctgttgaacaagtttggaaagaaatgcacaaattgttacctttttctcctgattctgttgttactcatggtgatttttctttagataatttgatctttgatgaaggtaaattgattggttgtattgatgttggtcgtgttggtattgctgatcgttatcaagatttagctattttatggaattgtttaggtgaattttctccttctttacagaaacgtttatttcagaaatatggtattgataatcctgatatgaacaagttacaatttcatttaatgttggacgagttcttttaagaattaattcatgaccaaaatcccttaacgtgagttttcgttccactgagcgtcagaccccgtagaaaagatcaaaggatcttcttgagatcctttttttctgcgcgtaatctgctgctatttaaattacgtacacgtgttattactttgttaacgacaattgtcttaattaactgggcctcatgggccttccgctcactgcccgctttccagtcgggaaacctgtcgtgccagctctgcagatgacggtgaaaacctctgacacatgcagctcccggagacggtcacagcttgtctgtaagcggatgccgggagcagacaagcccgtcagggcgcgtcagcgggtgttggcgggtgtcggggcgcagccatgacccagtcacgtagcgatagcggagtgtatactggcttaactatgcggcatcagagcagattgtactgagagtgcaccatatgcggtgtgaaataccgcacagatgcgtaaggagaaaataccgcatcaggcgctcttccgcttcctcgctcactgactcgctgcgctcggtcgttcggctgcggcgagcggtatcagctcactcaaaggcggtaatacggttatccacagaatcaggggataacgcaggaaagaacatgtgagcaaaaggccagcaaaaggccaggaaccgtaaaaaggccgcgttgctggcgtttttccataggctccgcccccctgacgagcatcacaaaaatcgacgctcaagtcagaggtggcgaaacccgacaggactataaagataccaggcgtttccccctggaagctccctcgtgcgctctcctgttccgaccctgccgcttaccggatacctgtccgcctttctcccttcgggaagcgtggcgctttctcatagctcacgctgtaggtatctcagttcggtgtaggtcgttcgctccaagctgggctgtgtgcacgaaccccccgttcagcccgaccgctgcgccttatccggtaactatcgtcttgagtccaacccggtaagacacgacttatcgccactggcagcagccactggtaacaggattagcagagcgaggtatgtaggcggtgctacagagttcttgaagtggtggcctaactacggctacactagaaggacagtatttggtatctgcgctctgctgaagccagttaccttcggaaaaagagttggtagctcttgatccggcaaacaaaccaccgctggtagcggtggtttttttgtttgcaagcagcagattacgcgcagaaaaaaaggatctcaagaagatcctttgatcttttctactgcagaagcttgttagacaccctgtcatgtattttatattatttatttcaccatacggattaagtgaaacctaatgaaaatagtactttcggagctttaactttaatgaaggtatgtttttttatagacatcgatgtctggtttaacaataggaaaaagtagctaaaactcccatgaattaaagaaataacaaggtgtctaacaacctgttattaagaatgttagaaaagacttaacatttgtgttgagtttttatagacattggtgtctagacatacggtagataaggtttgctcaaaaataaaataaaaaaagattggactaaaaaacatttaatttagtacaatttaattagttattttttcgtctcaaattttgctttgttgagcagaaatttagataaaaaaatccccgtgatcagattacaatgtcgttcattgtacgatgtgtcgaaaaatctttacgacactctaaactgaccacacgggggaaaaagaaaactgaactaataacatcatgatactcggaaaacctagcaattctcaacccctaaacaaaagaaacttccaaaaccctgaccatataaaggagtggcaacaatcagcaatcagtcaagatttgatagcagaaaatcttgtatcggttgctaatggttttgatgtactatttatcggcaataaataccgaactaacacgggtgttctgtcacggcacatattaaactcctattctcatttagaagatggtggttcgtatggtagaacatttgacccatttaccaataaagaaatgcagtgggttcaatttaaaccgaatagaccaagaaaaggttctactggtaaggtaatcaaatatgaatcgccaaaaggtgaacctacaagagttctaatgccgtttgtgcctatgaaaatatggcaacggattagcgataagttcggagtaccgattaatccgaaaaaagatactcacttttgggaatgggtaaagaataatccatcgataccgattgccattacagaaggaaataaaaaagctaattgcctattatcctatggctatcctgctattgcctttgtaggcatttggaacggattagagaaaataaatgatttctcgaaggaaaagcagttaaaagaggatttgaaatggttgttatccaacggcaaccgaaatattaatatcatctttgaccaagaccagaaacaaaaaactgtaattaatgtaaacaaagctattttcgctttatcttctctaataagtagaaatggtcataaagttaatattgtgcaatggttgccgtcaaaaggtaaaggaatagatgattatttggtagctttaccttttgagaaaagagaaaatcatttagacaacttaattaaaattgcaccatcatttaatttttggtcaactaaatacttattcaagtgtcgtaaaccagatttaaccgtaaattgccgttatttgagcgatgcagtaaaagaattacctcaagaggatatagcattaatagcacctcacggcacgggtaaaacttcattagtagctactcacgttaagaatcggagttatcacggaaggaaaactatttcattggtgcatcttgaaagtttagccaaagctaatggcaacgcacttggattatattaccgaaccgaaaataatattgaaaagcaatatcttggatttagcttatgtgtagatagttgccgtgataagattaacggcattacaactgatattatttcaggtcaagattattgccttttcattgatgaaattgaccaagtaattccacacatccttaacagtgaaactgaagtaagtaagtatagatgcaccatcattgacactttttctgaactggtgagaaatgctgaacaggtcattattgctgatgctgatttatccgatgtgacgattgacctaatagaaaacatcagaggtaaaaaactatatgtaatcaagaatgaatatcagtatcagggaatgacttttaacgccgttggttcaccattagaaatgatggcaatgatgggaaaatcggtgtcagaaggcaagaaattatttattaacaccacatcccaaaaggcaaaaagtaagtacggcacaatcgctcttgagtcttatatttttggtctaaataaagaagcaaagatattaagaatagactctgaaaccactaaaaaccctgaacatccagcctataaaatcattgaccaagacttaaataatatcctcaaagattatgattatgtcattgcctcaccttgccttcaaacaggtgtcagtattaccttaaaagggcattttgaccagcaatttaacttttccagtggaaacattacacctcattgctttttacagcaaatgtggcggttgagggatgcagaaattgaaagattctattatgtgccgaactcatctaacctcaatctcattgggaataagtcaagttcaccatcagaccttctaaagagcaataacaagatggcaacggcaacggttaaccttttgggtagaatcgactccgaatattccctagagtatgaatcgcacggcatttggcttgagacgtgggcaaaattatcagcacggcataacagttcaatgcgttgttactctgaaattcttacctatctaattacgtctcaagggcataaattaaatatcaacattccctcacctcttgcagatattaagaagctaaatgatgaggtaagtagtaacagggaaaaggtaaaaaatgagagatactctcagaggttaaactcaccagatattaacgatgcagaagctaccatactcgaatctaaagagcaaaaaatcggattgactctcaatgagagatgcaccctagaaaagcataaagttaagaagcggtatgggaatgtaaagatggatattctcacctttgatgatgatggactataccccaaactcagactattttattacctcaccatcggtaaacctcatctcaaggctaatgacagaaaagctattgccaaaatgggcaatgacaataaaggcaagattctatcaaaagacttagttaataaaacttactccgctcgtgtgaaggtcttagagattcttaaactaactgactttatcgacaatcttagagatgaactcttaataactcccaataatccagctatcaccgattttaataatcttctgctaagagctaagaaggatttaagagtattaggagtcaacatcggaaaatatccaatggccaacattaatgccgtacttactctcattggtcacaaactttctgtaatgagagatgagttcggaaaagagaaaaggataaaagtagatggtaaatcataccgatgttatcaacttgaaacattaccagattttaccaatgatactcttgactactggttagaaaatgatagccaaaaagaagtaacagcaacagaaaattactccgaaaattttaacccttcaaatagctacaatccagacagtaagacactttcagagggtgcaaatttcctatatataaataaagaagaattgcatccaaataaattgcacctagaaataaaagaaggtgctgaactttttttattcggggtaaaggtgattgtgaaaggaatcttggacggggcagtaactatattctctatgggtcaagaatacgatttatccctcaatgaactagaggggatgttaacatcatgaactttacaagaatctttttaaagggcgatcgcaccatgttaaatgatggtacatttgttcagatatttgatatttaccatgaccacgcattgggagtgacccttgaccttaagacagaaaaaattatttccgatgatgttagggtaattactgtcaaagacttattgttcgatggcacttataaaggggtaaaatcttttatgcccgataatgcccgataatgcccgattgatgctacaaaatcccataatcataagcgataatcccctaatagcttgtaattcttgaaccgtagcgattttagagtattccaaaaagaagaaataaacaccgcaaaatgtcgtatttcacatatataaaccaaggttttttgccctaaaatctttatgtttgtagtgtgatgttgggtcaaaatggtcagaaaagttgcaaggtttttatggatgcttacgcgcgcgaggggtaagcatccccaaatagttactttatcctagtccatgcccatttattgccgtcccgttcggctttaaaaaagtgccaaaactcacaaggtgcaataaaaagttctgtacctttcgcaaccctagataatctttcaacagttactttttttcctattatctcggtacaaagtttggctagtttctcttttccctctttttcaatcaagccttcttgtatgcccaactcattgattaatctctctatttttaccattatttcccgttcaggtagtttatcccctaaatcttcatcggggggcaatgtagggcattctgaaggggctttttcttctgtctggacattatctaatattgaagtaaccaaactatcttcagttttttctattcctattaattcatattcggttactgtatccgtatcaatatccgaataactatctttatccgtattagctattcggttaagtttatccgttaactcagaaacaagactatatagcggttttagcttttcttctatcctgttatctaatacggataagtttatacggttatcattatccgtattagtatcattgggcttttttggtagttctaccccctcataaaccgcttttattcccaattccaacagactgataacagtatcctttataatgggttttttgctgatatggtgaacttttgccccttccatcattgcgatactttctatctcactcatcaacttatcgcttaagtgaatctcgtatctgtttaatcccttactggttttattcatatccgtttactttattcggttaacaattctattttatacgaataaaatattatacggttaactttatacgtttaactattttatctatacggataacagtaataagttattcgtattagttatacgtttacttttatccaaataaaattagtgcatttaaactaaaagaatgattttatcggagttgatagcattggattaacctaaagatgtttataagctatatctgataagtatttaaggttattttgttattctgtttattgacattatcagaataaaagaatagaatataattgttgagagataagaggtttaagtgattatggttaagaagttagttggttatgtcagggtcagtagtgaatcgcaagaggataacactagcttacagaatcagatagagagaattgaagcatattgtatggcttttggttatgagttggtaaaaatattcaaagaggttgccactggtacaaaagcagatattgaaacccgtcctatttttaatgaagctatagaatacttgaaacaggataatgctaatggaattattgccttgaagctagaccgaatcgcacggaatgctttagatgtattgcgtttggttcgtgaaaccttagaaccacaaaataaaatgttagtgttactagatattcaggtagatacttcgacaccttcaggaaaaatgattttaactgtaatgagtgccgttgctgaactcgaaagagacatgatctatgatcgcactcaggggggtagaaagactaaagcccaaaagggcgggtatgcctacgggaaacctaaatttggctataagactgaagaaaaggaactaaaagaagattcagcacaacaggaaactattaaactaattaagagacaccgtaggtcagggaaaagctaccagaaaatagctgattatctcaatgcccaaagtattcccactaaacaaggtaagaaatggagttctagcgtcgtctatcgaatctgtcaggaaaaagctggttaagtctgtttatagatatttagaatttattgaataaaaatagtatgaacaataaatatttatggactaaccacgctcggaaacgtttaactgaacgatgggaaataaaagaatcatgggttattgataccatcgaaaatcctgaacgttcagaatttattgttgatgagtcaggggaaaaatatcattactataaaagaatagctaagtttaagaatagagtgttagaagtgataacttctgccaactcaacacccacaagaataataaccttttactttaaccgtaacatgaggaaaaatttatgattgttacttacgataatgaagttgacgcaatttattttaagttaacggaaaataaaattgatagcaccgaacctcaaacagacaggattatcattgattacgatgaaagtaataatattgttggcattgaggtattagattttaattatcttgtcaagaaaggtttaaccgttgctgatttacctttttctgaagatgaaagattaacagcttctcaatattttaattttcctgttgctatctaatccagaaggggcaataatccccttctttcatcgagttagacttaatatcacaaaagtcattttcattttaccgtttcttttccacagcgtccgtacgcccctcgttaaatctcaaaaccgacaatttatgatgtttataaaaagttactcactttaataagtatttatactcattaaagggttattctttttttgtagcctgataggttgggaaggaatatttcagattatcagatttgttgaatatttttcgtcagatacgcaaaccttacaaacataattaacaactgaaactattgatatgtctaggttttagctctatcacaggttggatctg

SEQ ID NO: 84 - DNA, 13070 bp, Cyanobacterium sp. ABICyano1
tcgacaattaataacttcttcctgtacgggcgaatggccatttgctcctaactaactccgtactgctttgcggaacgagcgtagcgaactctccgaattactaagccttcatccctgatagatgcaaaaaacgaattaaaattatgtgtaaaaagaaaatgtgtctttatttagtagtcaaagttacaaaatattaagaatcaaattaataatgtattgggcagttaagtatataagtctttaaatatttatttgtattcaatatattaaccgaggacaaattatgaattcttacactgttggaacctatttagcagaacgtttagttcaaattggtctcaaacaccattttgcagtagctggtgattataatttagttttattggataacttattgttaaataagaatatggaacaagtgtattgttgtaatgaattaaactgtggtttttctgctgagggatatgctcgtgcaaaaggtgctgccgcagcagttgttacttattctgttggagcattaagtgcttttgacgctattggaggtgcttatgcagaaaatttacctgtaatcttaatctctggtgcacccaataacaacgatcacgctgctggtcatgtattgcatcatgctttaggtaaaaccgattatcattaccaattagaaatggcaaaaaatattaccgctgccgcagaagctatttatactcccgaagaagcacctgctaagatcgatcacgtaattaaaaccgctctccgtgagaaaaaacccgtatatttagaaatcgcttgcaatatcgcttctatgccttgtgcagctcctggacctgctagtgctttatttaacgatgaagcatctgatgaggctagtttaaatgccgctgttgaagaaactttgaaatttattgctaatcgtgataaagtagctgttttagttggttctaaactccgtgccgctggtgcagaagaagcggctgtaaaattcgcagatgccttaggaggtgctgttgccacaatggcagccgctaaaagttttttccccgaagaaaatcctcattacattggtacttcttggggtgaggtatcttaccctggtgtagaaaaaaccatgaaggaagctgatgcagtaattgcattagctcctgttttcaatgattactctaccactggttggactgatattccagaccccaaaaaattagttttagcagaacctcgctctgtagttgtgaatggtgttagatttcccagtgtacatctcaaagattatttaactcgtttagctcaaaaagtgagtaaaaagactggcgcactcgatttctttaaatctttaaatgctggtgaattaaagaaagcagctcctgctgatcccagtgctcctttagtgaatgccgaaatcgcaagacaagttgaagccttgttaactcctaacactaccgttattgccgagactggtgatagttggttcaatgctcaacgcatgaaattacccaatggtgctcgtgttgagtatgaaatgcaatggggtcacattggatggtctgttcctgctgcatttggatatgcagttggagcacctgagcgtagaaacattttaatggtaggtgatggttctttccaactcactgctcaagaagttgcacaaatggtacgtttaaaattgcctgttattatctttctcattaacaactatggttacaccattgaagttatgattcatgatggtccttataataacattaagaattgggattacgcaggtttaatggaggtatttaacggtaatggtggatacgacagtggagcaggtaaaggattaaaagctaaaacaggaggtgagttagctgaagcaattaaagtagctttagccaatacagatggtcctaccttaatcgaatgtttcattggacgtgaagattgtactgaagagttagttaaatggggaaagcgtgttgccgctgcaaattctcgtaaacctgtaaacaaactcttgtagttaggatccagcaaggtttcatcccgaccccctcagggtcgggatttttttattgtgagctcaactttagatattcgtagttggcaatgtcgtaaatgcggaacaatacatggaaaacatatagatttgtaatgagaaaaagtgtaaacaaatattaagaaaaagatcagaaaaatttaacaacacgtaataaaaaaatgcgtcactacgggttataaatttacatgaaaggttaaaacacttttctgagacgattttgataaaaaagttgtcaaaaaattaagtttctttacaaatgcttaacaaaaacttggttttaagcacaaaataagagagactaatttgcagaagttttacaaggaaatcttgaagaaaaagatctaagtaaaacgactctgtttaaccaaaatttaacaaatttaacaaaacaaactaaatctattaggagattaactacatatgcctatgatcaaagccttcgcagttcatgagtctgatggagatttacagccttttgaatatgatcctggtgcattattatctgatcaagttgagatcgaagttaaatattgtggaatttgtcattctgatttatctatgatctctaatgaatggggtatgacccaataccctttagtacctggacatgaggtagtaggtgcaatcgccaaagtaggtgaaaatgttaaaaatttatctgttggtcaaattgtaggattaggttggcacgcaggttattgtaacgaatgtcctcaatgtactactggtgatcaaaatttatgtgctactgctcaaggaactattgtaggacatcatggaggtttcgctgaaaaagttcgcgctgctgcaaattctgtagttcccatccctgaaggaatcgatttagaagctgctggacctttattttgtggaggtatcaccgtttttaatcctttagtacaatatggaatccaacccactgcaaaagttgctgtaattggaattggaggtttaggtcacatggctgttcaattcttaaacgcttggggttgtgaagttaccgcttttaccagttctgaagcaaaaatcactgaggctttagaattaggtgctcatcacactttaaacagtcgtgaccctgaagccatcgcagccgctgctggacagtttgatttaatcatttctaccgttaacgttaaattagattggaatgcctatttaagtactttaaaacctcacggtcgtttacacttcgtaggtgctactttagatcccttagacattaacgtttttgctttaatcatgcagcaacgttctatctctggtagtcctgttggatctcctgcaaccatcgcaaaaatgttagaatttgcaaaattacataaaattcaacctaaaattgaaacctttaaatttgaagatgttaaccaggctattgcacgtttaaaaagtggtgaagcccactatcgtattgtattatgtagataactagatctacttctaaactgaaacaaatttgagggtaggcttcattgtctgcccttatttttttatttaggaaaagtgaacagactaaagagtgttggctctattgctttgagtatgtaaattaggcgttgctgaattaaggtatgatttttgacccctgcaggatcatcttgctgaaaaactcgagcgctcgttccgcaaagcggtacggagttagttaggggctaatgggcattctcccgtacaggaaagagttagaagttattaattatcaacaattctcctttgcctagtgcatcgttacctttttaattaaaacataaggaaaactaataatcgtaataatttaacctcaaagtgtaaagaaatgtgaaattctgacttttataacgttaaagagggaaaaattagcagtttaaaatacctagagaatagtctggggtaagcatagagaattagattagttaagttaatcaaattcagaaaaaataataatcgtaaatagttaatctgggtgtatagaaaatgatccccttcatgataagatttaaactcgaaaagcaaaagccaaaaaactaacttccattaaaagaagttgttacatataacgctataaagaaaatttatatatttggaggataccaaccatgtctcatattcaacgtgaaactagttgttctcgccctcgtttaaattctaatatggatgccgatttatatggttataaatgggctcgtgataatgttggtcaatctggtgctactatttatcgtttatatggtaaacctgatgctcctgaattattcttgaaacatggtaaaggttctgttgctaatgatgttactgatgaaatggttcgtttaaactggttgactgaatttatgcctttacctactattaaacattttattcgtactcccgatgatgcttggttattaactactgctattcctggtaaaactgcttttcaagttttagaagaatatcctgattctggtgaaaatattgttgatgctttagctgtttttttacgtcgtttacattctattcccgtttgtaattgtccttttaattctgatcgtgtttttcgtttagctcaagctcaatctcgtatgaataatggtttagttgatgcttctgattttgatgatgaacgtaatggttggcctgttgaacaagtttggaaagaaatgcacaaattgttacctttttctcctgattctgttgttactcatggtgatttttctttagataatttgatctttgatgaaggtaaattgattggttgtattgatgttggtcgtgttggtattgctgatcgttatcaagatttagctattttatggaattgtttaggtgaattttctccttctttacagaaacgtttatttcagaaatatggtattgataatcctgatatgaacaagttacaatttcatttaatgttggacgagttcttttaagaattaattcatgaccaaaatcccttaacgtgagttttcgttccactgagcgtcagaccccgtagaaaagatcaaaggatcttcttgagatcctttttttctgcgcgtaatctgctgctatttaaattacgtacacgtgttattactttgttaacgacaattgtcttaattaactgggcctcatgggccttccgctcactgcccgctttccagtcgggaaacctgtcgtgccagctctgcagatgacggtgaaaacctctgacacatgcagctcccggagacggtcacagcttgtctgtaagcggatgccgggagcagacaagcccgtcagggcgcgtcagcgggtgttggcgggtgtcggggcgcagccatgacccagtcacgtagcgatagcggagtgtatactggcttaactatgcggcatcagagcagattgtactgagagtgcaccatatgcggtgtgaaataccgcacagatgcgtaaggagaaaataccgcatcaggcgctcttccgcttcctcgctcactgactcgctgcgctcggtcgttcggctgcggcgagcggtatcagctcactcaaaggcggtaatacggttatccacagaatcaggggataacgcaggaaagaacatgtgagcaaaaggccagcaaaaggccaggaaccgtaaaaaggccgcgttgctggcgtttttccataggctccgcccccctgacgagcatcacaaaaatcgacgctcaagtcagaggtggcgaaacccgacaggactataaagataccaggcgtttccccctggaagctccctcgtgcgctctcctgttccgaccctgccgcttaccggatacctgtccgcctttctcccttcgggaagcgtggcgctttctcatagctcacgctgtaggtatctcagttcggtgtaggtcgttcgctccaagctgggctgtgtgcacgaaccccccgttcagcccgaccgctgcgccttatccggtaactatcgtcttgagtccaacccggtaagacacgacttatcgccactggcagcagccactggtaacaggattagcagagcgaggtatgtaggcggtgctacagagttcttgaagtggtggcctaactacggctacactagaaggacagtatttggtatctgcgctctgctgaagccagttaccttcggaaaaagagttggtagctcttgatccggcaaacaaaccaccgctggtagcggtggtttttttgtttgcaagcagcagattacgcgcagaaaaaaaggatctcaagaagatcctttgatcttttctactgcagaagcttgttagacaccctgtcatgtattttatattatttatttcaccatacggattaagtgaaacctaatgaaaatagtactttcggagctttaactttaatgaaggtatgtttttttatagacatcgatgtctggtttaacaataggaaaaagtagctaaaactcccatgaattaaagaaataacaaggtgtctaacaacctgttattaagaatgttagaaaagacttaacatttgtgttgagtttttatagacattggtgtctagacatacggtagataaggtttgctcaaaaataaaataaaaaaagattggactaaaaaacatttaatttagtacaatttaattagttattttttcgtctcaaattttgctttgttgagcagaaatttagataaaaaaatccccgtgatcagattacaatgtcgttcattgtacgatgtgtcgaaaaatctttacgacactctaaactgaccacacgggggaaaaagaaaactgaactaataacatcatgatactcggaaaacctagcaattctcaacccctaaacaaaagaaacttccaaaaccctgaccatataaaggagtggcaacaatcagcaatcagtcaagatttgatagcagaaaatcttgtatcggttgctaatggttttgatgtactatttatcggcaataaataccgaactaacacgggtgttctgtcacggcacatattaaactcctattctcatttagaagatggtggttcgtatggtagaacatttgacccatttaccaataaagaaatgcagtgggttcaatttaaaccgaatagaccaagaaaaggttctactggtaaggtaatcaaatatgaatcgccaaaaggtgaacctacaagagttctaatgccgtttgtgcctatgaaaatatggcaacggattagcgataagttcggagtaccgattaatccgaaaaaagatactcacttttgggaatgggtaaagaataatccatcgataccgattgccattacagaaggaaataaaaaagctaattgcctattatcctatggctatcctgctattgcctttgtaggcatttggaacggattagagaaaataaatgatttctcgaaggaaaagcagttaaaagaggatttgaaatggttgttatccaacggcaaccgaaatattaatatcatctttgaccaagaccagaaacaaaaaactgtaattaatgtaaacaaagctattttcgctttatcttctctaataagtagaaatggtcataaagttaatattgtgcaatggttgccgtcaaaaggtaaaggaatagatgattatttggtagctttaccttttgagaaaagagaaaatcatttagacaacttaattaaaattgcaccatcatttaatttttggtcaactaaatacttattcaagtgtcgtaaaccagatttaaccgtaaattgccgttatttgagcgatgcagtaaaagaattacctcaagaggatatagcattaatagcacctcacggcacgggtaaaacttcattagtagctactcacgttaagaatcggagttatcacggaaggaaaactatttcattggtgcatcttgaaagtttagccaaagctaatggcaacgcacttggattatattaccgaaccgaaaataatattgaaaagcaatatcttggatttagcttatgtgtagatagttgccgtgataagattaacggcattacaactgatattatttcaggtcaagattattgccttttcattgatgaaattgaccaagtaattccacacatccttaacagtgaaactgaagtaagtaagtatagatgcaccatcattgacactttttctgaactggtgagaaatgctgaacaggtcattattgctgatgctgatttatccgatgtgacgattgacctaatagaaaacatcagaggtaaaaaactatatgtaatcaagaatgaatatcagtatcagggaatgacttttaacgccgttggttcaccattagaaatgatggcaatgatgggaaaatcggtgtcagaaggcaagaaattatttattaacaccacatcccaaaaggcaaaaagtaagtacggcacaatcgctcttgagtcttatatttttggtctaaataaagaagcaaagatattaagaatagactctgaaaccactaaaaaccctgaacatccagcctataaaatcattgaccaagacttaaataatatcctcaaagattatgattatgtcattgcctcaccttgccttcaaacaggtgtcagtattaccttaaaagggcattttgaccagcaatttaacttttccagtggaaacattacacctcattgctttttacagcaaatgtggcggttgagggatgcagaaattgaaagattctattatgtgccgaactcatctaacctcaatctcattgggaataagtcaagttcaccatcagaccttctaaagagcaataacaagatggcaacggcaacggttaaccttttgggtagaatcgactccgaatattccctagagtatgaatcgcacggcatttggcttgagacgtgggcaaaattatcagcacggcataacagttcaatgcgttgttactctgaaattcttacctatctaattacgtctcaagggcataaattaaatatcaacattccctcacctcttgcagatattaagaagctaaatgatgaggtaagtagtaacagggaaaaggtaaaaaatgagagatactctcagaggttaaactcaccagatattaacgatgcagaagctaccatactcgaatctaaagagcaaaaaatcggattgactctcaatgagagatgcaccctagaaaagcataaagttaagaagcggtatgggaatgtaaagatggatattctcacctttgatgatgatggactataccccaaactcagactattttattacctcaccatcggtaaacctcatctcaaggctaatgacagaaaagctattgccaaaatgggcaatgacaataaaggcaagattctatcaaaagacttagttaataaaacttactccgctcgtgtgaaggtcttagagattcttaaactaactgactttatcgacaatcttagagatgaactcttaataactcccaataatccagctatcaccgattttaataatcttctgctaagagctaagaaggatttaagagtattaggagtcaacatcggaaaatatccaatggccaacattaatgccgtacttactctcattggtcacaaactttctgtaatgagagatgagttcggaaaagagaaaaggataaaagtagatggtaaatcataccgatgttatcaacttgaaacattaccagattttaccaatgatactcttgactactggttagaaaatgatagccaaaaagaagtaacagcaacagaaaattactccgaaaattttaacccttcaaatagctacaatccagacagtaagacactttcagagggtgcaaatttcctatatataaataaagaagaattgcatccaaataaattgcacctagaaataaaagaaggtgctgaactttttttattcggggtaaaggtgattgtgaaaggaatcttggacggggcagtaactatattctctatgggtcaagaatacgatttatccctcaatgaactagaggggatgttaacatcatgaactttacaagaatctttttaaagggcgatcgcaccatgttaaatgatggtacatttgttcagatatttgatatttaccatgaccacgcattgggagtgacccttgaccttaagacagaaaaaattatttccgatgatgttagggtaattactgtcaaagacttattgttcgatggcacttataaaggggtaaaatcttttatgcccgataatgcccgataatgcccgattgatgctacaaaatcccataatcataagcgataatcccctaatagcttgtaattcttgaaccgtagcgattttagagtattccaaaaagaagaaataaacaccgcaaaatgtcgtatttcacatatataaaccaaggttttttgccctaaaatctttatgtttgtagtgtgatgttgggtcaaaatggtcagaaaagttgcaaggtttttatggatgcttacgcgcgcgaggggtaagcatccccaaatagttactttatcctagtccatgcccatttattgccgtcccgttcggctttaaaaaagtgccaaaactcacaaggtgcaataaaaagttctgtacctttcgcaaccctagataatctttcaacagttactttttttcctattatctcggtacaaagtttggctagtttctcttttccctctttttcaatcaagccttcttgtatgcccaactcattgattaatctctctatttttaccattatttcccgttcaggtagtttatcccctaaatcttcatcggggggcaatgtagggcattctgaaggggctttttcttctgtctggacattatctaatattgaagtaaccaaactatcttcagttttttctattcctattaattcatattcggttactgtatccgtatcaatatccgaataactatctttatccgtattagctattcggttaagtttatccgttaactcagaaacaagactatatagcggttttagcttttcttctatcctgttatctaatacggataagtttatacggttatcattatccgtattagtatcattgggcttttttggtagttctaccccctcataaaccgcttttattcccaattccaacagactgataacagtatcctttataatgggttttttgctgatatggtgaacttttgccccttccatcattgcgatactttctatctcactcatcaacttatcgcttaagtgaatctcgtatctgtttaatcccttactggttttattcatatccgtttactttattcggttaacaattctattttatacgaataaaatattatacggttaactttatacgtttaactattttatctatacggataacagtaataagttattcgtattagttatacgtttacttttatccaaataaaattagtgcatttaaactaaaagaatgattttatcggagttgatagcattggattaacctaaagatgtttataagctatatctgataagtatttaaggttattttgttattctgtttattgacattatcagaataaaagaatagaatataattgttgagagataagaggtttaagtgattatggttaagaagttagttggttatgtcagggtcagtagtgaatcgcaagaggataacactagcttacagaatcagatagagagaattgaagcatattgtatggcttttggttatgagttggtaaaaatattcaaagaggttgccactggtacaaaagcagatattgaaacccgtcctatttttaatgaagctatagaatacttgaaacaggataatgctaatggaattattgccttgaagctagaccgaatcgcacggaatgctttagatgtattgcgtttggttcgtgaaaccttagaaccacaaaataaaatgttagtgttactagatattcaggtagatacttcgacaccttcaggaaaaatgattttaactgtaatgagtgccgttgctgaactcgaaagagacatgatctatgatcgcactcaggggggtagaaagactaaagcccaaaagggcgggtatgcctacgggaaacctaaatttggctataagactgaagaaaaggaactaaaagaagattcagcacaacaggaaactattaaactaattaagagacaccgtaggtcagggaaaagctaccagaaaatagctgattatctcaatgcccaaagtattcccactaaacaaggtaagaaatggagttctagcgtcgtctatcgaatctgtcaggaaaaagctggttaagtctgtttatagatatttagaatttattgaataaaaatagtatgaacaataaatatttatggactaaccacgctcggaaacgtttaactgaacgatgggaaataaaagaatcatgggttattgataccatcgaaaatcctgaacgttcagaatttattgttgatgagtcaggggaaaaatatcattactataaaagaatagctaagtttaagaatagagtgttagaagtgataacttctgccaactcaacacccacaagaataataaccttttactttaaccgtaacatgaggaaaaatttatgattgttacttacgataatgaagttgacgcaatttattttaagttaacggaaaataaaattgatagcaccgaacctcaaacagacaggattatcattgattacgatgaaagtaataatattgttggcattgaggtattagattttaattatcttgtcaagaaaggtttaaccgttgctgatttacctttttctgaagatgaaagattaacagcttctcaatattttaattttcctgttgctatctaatccagaaggggcaataatccccttctttcatcgagttagacttaatatcacaaaagtcattttcattttaccgtttcttttccacagcgtccgtacgcccctcgttaaatctcaaaaccgacaatttatgatgtttataaaaagttactcactttaataagtatttatactcattaaagggttattctttttttgtagcctgataggttgggaaggaatatttcagattatcagatttgttgaatatttttcgtcagatacgcaaaccttacaaacataattaacaactgaaactattgatatgtctaggttttagctctatcacaggttggatctg

SEQ ID NO: 85 - DNA, 13063 bp, Cyanobacterium sp. ABICyano1
tcgacaattaataacttcttcctgtacgggcgaatggccatttgctcctaactaactccgtactgctttgcggaacgagcgtagcgaactctccgaattactaagccttcatccctgatagatgcaaaaaacgaattaaaattatgtgtaaaaagaaaatgtgtctttatttagtagtcaaagttacaaaatattaagaatcaaattaataatgtattgggcagttaagtatataagtctttaaatatttatttgtattcaatatattaaccgaggacaaattatgaattcttataccgtgggtacttatttagccgaacgcttagtgcaaattggtttaaaacatcattttgccgtggctggggactataatttagtgttattggataacttattattaaataaaaacatggaacaagtgtattgttgtaatgaattaaattgtggtttttctgctgaaggttatgctagagctaaaggtgcagctgctgctgttgttacttattctgtgggtgctttatctgcttttgatgctattggtggtgcttatgccgaaaatttacccgtgattttaatttctggtgcccctaataataatgatcatgccgctggacatgttttacatcatgccttaggtaaaaccgattatcattatcaattagaaatggccaaaaatattactgctgctgccgaagctatttatactcctgaagaagcccctgccaaaattgatcatgtgattaaaaccgccttacgcgaaaaaaaacccgtgtatttagaaattgcctgtaatattgcttctatgccttgtgctgctcctgggcctgcttctgctttatttaatgatgaagcctctgatgaagctagtttaaatgctgccgtggaagaaaccttaaaatttattgccaatcgcgataaagttgccgtgttagttggttctaaattaagagctgctggtgctgaagaagctgctgttaaatttgctgatgctttaggtggtgcagttgctactatggctgctgccaaatctttttttcccgaagaaaatccccattatattggaactagttggggagaagtttcttatcctggtgtggaaaaaactatgaaagaagccgacgctgttattgctttagcccctgtgtttaatgattattctaccactggttggactgatattcccgatcccaaaaaattagttttagccgaacctcgttctgttgttgttaatggtgttcgctttccctctgtgcatttaaaagattatttaacccgcttagcccaaaaagtttctaaaaaaactggtgccttagatttttttaaatctttaaatgcgggtgaattaaaaaaagctgctcctgctgatccttctgctcctttagttaatgctgaaattgcccgtcaagttgaagccttattaacccctaatactaccgttattgccgaaactggtgattcttggtttaatgcccaacgcatgaaattacctaatggtgcccgtgttgaatatgaaatgcaatggggtcatattggttggtctgtacctgctgcttttggttatgctgttggtgctcctgaacgtcgtaatattttaatggtgggtgatggttcttttcaattaactgcccaagaagttgcccaaatggttcgcttaaaattacccgttattatttttttaataaataattatggttataccattgaagtgatgattcatgatgggccatataataatattaaaaattgggattatgcgggtttaatggaagtgtttaatggtaatggtggttatgattctggtgctggtaaaggtttaaaagccaaaactggtggtgaattagctgaagctattaaagttgccttagccaatactgatgggccaaccttaattgaatgttttattggtcgcgaagattgtaccgaagaattagttaaatggggtaaacgtgttgctgctgctaattctcgcaaacccgtgaataaattattgtaaggatccagcaagtttcatcccgaccccctcagggtcgggatttttttattgtgagctcaactttagatattcgtagttggcaatgtcgtaaatgcggaacaatacatggaaaacatatagatttgtaatgagaaaaagtgtaaacaaatattaagaaaaagatcagaaaaatttaacaacacgtaataaaaaaatgcgtcactacgggttataaatttacatgaaaggttaaaacacttttctgagacgattttgataaaaaagttgtcaaaaaattaagtttctttacaaatgcttaacaaaaacttggttttaagcacaaaataagagagactaatttgcagaagttttacaaggaaatcttgaagaaaaagatctaagtaaaacgactctgtttaaccaaaatttaacaaatttaacaaaacaaactaaatctattaggagattaactacatatgatccgtgcttatgcagctcaggagaaaggaggtaaattagaaccctttgattatgaccctggtattttagcagacgaagacgttgagattgctgttgagtactgtggaatttgtcattccgatttatctatgctcgataatgactggggtttaactacttaccctttcgttcccggtcacgaggttgtaggaaccattgctgcattaggagccaaagtaaaagaactcaaattgggtcagcgtgtaggattaggatggttcagtcgttcttgttctacctgtgagacttgtatgtctggtgatcaaaatttatgtgcaaccgctgaaggtactattgtaggaagacatggtggatttgctgagcgtgttcgtgctcaccattcttggttagtacctttacccgatcaattagacgcagctaaagccggtcctttattttgtggtggtatcactgtatttaatcctatcgttcagttcaacatcaaacctaccgcacgtgtaggtgttatcggaatcggaggtttaggtcacattgctctcaaatttttaaaagcatggggttgtgaggtaactgcctttagttcttctcctgacaaagaaaccgaagctaaagagttaggtgcaacccattttattaactctcgtgatcctgaagcattacaaagtgttcagaactatttcgactttattattagtactgtaaatgtaaacttagattggggattatacattgcttgtttacgtcctaaaggaagattacacattgtaggtgcagtattagagcctatggctacttatgcattccctttaatcatgggacagaaatctattagtggatctcccttaggatctcctagtactgtttctaaaatgatcgagtttgcttcccgtcatggtatcgagcccgttaccgaaacttaccccatttctcgtgttaacgaagcaatggagaaattaagaactggtcagcccaaatacagattggttctccaaattaaataactagatctacttctaaactgaaacaaatttgagggtaggcttcattgtctgcccttatttttttatttaggaaaagtgaacagactaaagagtgttggctctattgctttgagtatgtaaattaggcgttgctgaattaaggtatgatttttgacccctgcaggatcatcttgctgaaaaactcgagcgctcgttccgcaaagcggtacggagttagttaggggctaatgggcattctcccgtacaggaaagagttagaagttattaattatcaacaattctcctttgcctagtgcatcgttacctttttaattaaaacataaggaaaactaataatcgtaataatttaacctcaaagtgtaaagaaatgtgaaattctgacttttataacgttaaagagggaaaaattagcagtttaaaatacctagagaatagtctggggtaagcatagagaattagattagttaagttaatcaaattcagaaaaaataataatcgtaaatagttaatctgggtgtatagaaaatgatccccttcatgataagatttaaactcgaaaagcaaaagccaaaaaactaacttccattaaaagaagttgttacatataacgctataaagaaaatttatatatttggaggataccaaccatgtctcatattcaacgtgaaactagttgttctcgccctcgtttaaattctaatatggatgccgatttatatggttataaatgggctcgtgataatgttggtcaatctggtgctactatttatcgtttatatggtaaacctgatgctcctgaattattcttgaaacatggtaaaggttctgttgctaatgatgttactgatgaaatggttcgtttaaactggttgactgaatttatgcctttacctactattaaacattttattcgtactcccgatgatgcttggttattaactactgctattcctggtaaaactgcttttcaagttttagaagaatatcctgattctggtgaaaatattgttgatgctttagctgtttttttacgtcgtttacattctattcccgtttgtaattgtccttttaattctgatcgtgtttttcgtttagctcaagctcaatctcgtatgaataatggtttagttgatgcttctgattttgatgatgaacgtaatggttggcctgttgaacaagtttggaaagaaatgcacaaattgttacctttttctcctgattctgttgttactcatggtgatttttctttagataatttgatctttgatgaaggtaaattgattggttgtattgatgttggtcgtgttggtattgctgatcgttatcaagatttagctattttatggaattgtttaggtgaattttctccttctttacagaaacgtttatttcagaaatatggtattgataatcctgatatgaacaagttacaatttcatttaatgttggacgagttcttttaagaattaattcatgaccaaaatcccttaacgtgagttttcgttccactgagcgtcagaccccgtagaaaagatcaaaggatcttcttgagatcctttttttctgcgcgtaatctgctgctatttaaattacgtacacgtgttattactttgttaacgacaattgtcttaattaactgggcctcatgggccttccgctcactgcccgctttccagtcgggaaacctgtcgtgccagctctgcagatgacggtgaaaacctctgacacatgcagctcccggagacggtcacagcttgtctgtaagcggatgccgggagcagacaagcccgtcagggcgcgtcagcgggtgttggcgggtgtcggggcgcagccatgacccagtcacgtagcgatagcggagtgtatactggcttaactatgcggcatcagagcagattgtactgagagtgcaccatatgcggtgtgaaataccgcacagatgcgtaaggagaaaataccgcatcaggcgctcttccgcttcctcgctcactgactcgctgcgctcggtcgttcggctgcggcgagcggtatcagctcactcaaaggcggtaatacggttatccacagaatcaggggataacgcaggaaagaacatgtgagcaaaaggccagcaaaaggccaggaaccgtaaaaaggccgcgttgctggcgtttttccataggctccgcccccctgacgagcatcacaaaaatcgacgctcaagtcagaggtggcgaaacccgacaggactataaagataccaggcgtttccccctggaagctccctcgtgcgctctcctgttccgaccctgccgcttaccggatacctgtccgcctttctcccttcgggaagcgtggcgctttctcatagctcacgctgtaggtatctcagttcggtgtaggtcgttcgctccaagctgggctgtgtgcacgaaccccccgttcagcccgaccgctgcgccttatccggtaactatcgtcttgagtccaacccggtaagacacgacttatcgccactggcagcagccactggtaacaggattagcagagcgaggtatgtaggcggtgctacagagttcttgaagtggtggcctaactacggctacactagaaggacagtatttggtatctgcgctctgctgaagccagttaccttcggaaaaagagttggtagctcttgatccggcaaacaaaccaccgctggtagcggtggtttttttgtttgcaagcagcagattacgcgcagaaaaaaaggatctcaagaagatcctttgatcttttctactgcagaagcttgttagacaccctgtcatgtattttatattatttatttcaccatacggattaagtgaaacctaatgaaaatagtactttcggagctttaactttaatgaaggtatgtttttttatagacatcgatgtctggtttaacaataggaaaaagtagctaaaactcccatgaattaaagaaataacaaggtgtctaacaacctgttattaagaatgttagaaaagacttaacatttgtgttgagtttttatagacattggtgtctagacatacggtagataaggtttgctcaaaaataaaataaaaaaagattggactaaaaaacatttaatttagtacaatttaattagttattttttcgtctcaaattttgctttgttgagcagaaatttagataaaaaaatccccgtgatcagattacaatgtcgttcattgtacgatgtgtcgaaaaatctttacgacactctaaactgaccacacgggggaaaaagaaaactgaactaataacatcatgatactcggaaaacctagcaattctcaacccctaaacaaaagaaacttccaaaaccctgaccatataaaggagtggcaacaatcagcaatcagtcaagatttgatagcagaaaatcttgtatcggttgctaatggttttgatgtactatttatcggcaataaataccgaactaacacgggtgttctgtcacggcacatattaaactcctattctcatttagaagatggtggttcgtatggtagaacatttgacccatttaccaataaagaaatgcagtgggttcaatttaaaccgaatagaccaagaaaaggttctactggtaaggtaatcaaatatgaatcgccaaaaggtgaacctacaagagttctaatgccgtttgtgcctatgaaaatatggcaacggattagcgataagttcggagtaccgattaatccgaaaaaagatactcacttttgggaatgggtaaagaataatccatcgataccgattgccattacagaaggaaataaaaaagctaattgcctattatcctatggctatcctgctattgcctttgtaggcatttggaacggattagagaaaataaatgatttctcgaaggaaaagcagttaaaagaggatttgaaatggttgttatccaacggcaaccgaaatattaatatcatctttgaccaagaccagaaacaaaaaactgtaattaatgtaaacaaagctattttcgctttatcttctctaataagtagaaatggtcataaagttaatattgtgcaatggttgccgtcaaaaggtaaaggaatagatgattatttggtagctttaccttttgagaaaagagaaaatcatttagacaacttaattaaaattgcaccatcatttaatttttggtcaactaaatacttattcaagtgtcgtaaaccagatttaaccgtaaattgccgttatttgagcgatgcagtaaaagaattacctcaagaggatatagcattaatagcacctcacggcacgggtaaaacttcattagtagctactcacgttaagaatcggagttatcacggaaggaaaactatttcattggtgcatcttgaaagtttagccaaagctaatggcaacgcacttggattatattaccgaaccgaaaataatattgaaaagcaatatcttggatttagcttatgtgtagatagttgccgtgataagattaacggcattacaactgatattatttcaggtcaagattattgccttttcattgatgaaattgaccaagtaattccacacatccttaacagtgaaactgaagtaagtaagtatagatgcaccatcattgacactttttctgaactggtgagaaatgctgaacaggtcattattgctgatgctgatttatccgatgtgacgattgacctaatagaaaacatcagaggtaaaaaactatatgtaatcaagaatgaatatcagtatcagggaatgacttttaacgccgttggttcaccattagaaatgatggcaatgatgggaaaatcggtgtcagaaggcaagaaattatttattaacaccacatcccaaaaggcaaaaagtaagtacggcacaatcgctcttgagtcttatatttttggtctaaataaagaagcaaagatattaagaatagactctgaaaccactaaaaaccctgaacatccagcctataaaatcattgaccaagacttaaataatatcctcaaagattatgattatgtcattgcctcaccttgccttcaaacaggtgtcagtattaccttaaaagggcattttgaccagcaatttaacttttccagtggaaacattacacctcattgctttttacagcaaatgtggcggttgagggatgcagaaattgaaagattctattatgtgccgaactcatctaacctcaatctcattgggaataagtcaagttcaccatcagaccttctaaagagcaataacaagatggcaacggcaacggttaaccttttgggtagaatcgactccgaatattccctagagtatgaatcgcacggcatttggcttgagacgtgggcaaaattatcagcacggcataacagttcaatgcgttgttactctgaaattcttacctatctaattacgtctcaagggcataaattaaatatcaacattccctcacctcttgcagatattaagaagctaaatgatgaggtaagtagtaacagggaaaaggtaaaaaatgagagatactctcagaggttaaactcaccagatattaacgatgcagaagctaccatactcgaatctaaagagcaaaaaatcggattgactctcaatgagagatgcaccctagaaaagcataaagttaagaagcggtatgggaatgtaaagatggatattctcacctttgatgatgatggactataccccaaactcagactattttattacctcaccatcggtaaacctcatctcaaggctaatgacagaaaagctattgccaaaatgggcaatgacaataaaggcaagattctatcaaaagacttagttaataaaacttactccgctcgtgtgaaggtcttagagattcttaaactaactgactttatcgacaatcttagagatgaactcttaataactcccaataatccagctatcaccgattttaataatcttctgctaagagctaagaaggatttaagagtattaggagtcaacatcggaaaatatccaatggccaacattaatgccgtacttactctcattggtcacaaactttctgtaatgagagatgagttcggaaaagagaaaaggataaaagtagatggtaaatcataccgatgttatcaacttgaaacattaccagattttaccaatgatactcttgactactggttagaaaatgatagccaaaaagaagtaacagcaacagaaaattactccgaaaattttaacccttcaaatagctacaatccagacagtaagacactttcagagggtgcaaatttcctatatataaataaagaagaattgcatccaaataaattgcacctagaaataaaagaaggtgctgaactttttttattcggggtaaaggtgattgtgaaaggaatcttggacggggcagtaactatattctctatgggtcaagaatacgatttatccctcaatgaactagaggggatgttaacatcatgaactttacaagaatctttttaaagggcgatcgcaccatgttaaatgatggtacatttgttcagatatttgatatttaccatgaccacgcattgggagtgacccttgaccttaagacagaaaaaattatttccgatgatgttagggtaattactgtcaaagacttattgttcgatggcacttataaaggggtaaaatcttttatgcccgataatgcccgataatgcccgattgatgctacaaaatcccataatcataagcgataatcccctaatagcttgtaattcttgaaccgtagcgattttagagtattccaaaaagaagaaataaacaccgcaaaatgtcgtatttcacatatataaaccaaggttttttgccctaaaatctttatgtttgtagtgtgatgttgggtcaaaatggtcagaaaagttgcaaggtttttatggatgcttacgcgcgcgaggggtaagcatccccaaatagttactttatcctagtccatgcccatttattgccgtcccgttcggctttaaaaaagtgccaaaactcacaaggtgcaataaaaagttctgtacctttcgcaaccctagataatctttcaacagttactttttttcctattatctcggtacaaagtttggctagtttctcttttccctctttttcaatcaagccttcttgtatgcccaactcattgattaatctctctatttttaccattatttcccgttcaggtagtttatcccctaaatcttcatcggggggcaatgtagggcattctgaaggggctttttcttctgtctggacattatctaatattgaagtaaccaaactatcttcagttttttctattcctattaattcatattcggttactgtatccgtatcaatatccgaataactatctttatccgtattagctattcggttaagtttatccgttaactcagaaacaagactatatagcggttttagcttttcttctatcctgttatctaatacggataagtttatacggttatcattatccgtattagtatcattgggcttttttggtagttctaccccctcataaaccgcttttattcccaattccaacagactgataacagtatcctttataatgggttttttgctgatatggtgaacttttgccccttccatcattgcgatactttctatctcactcatcaacttatcgcttaagtgaatctcgtatctgtttaatcccttactggttttattcatatccgtttactttattcggttaacaattctattttatacgaataaaatattatacggttaactttatacgtttaactattttatctatacggataacagtaataagttattcgtattagttatacgtttacttttatccaaataaaattagtgcatttaaactaaaagaatgattttatcggagttgatagcattggattaacctaaagatgtttataagctatatctgataagtatttaaggttattttgttattctgtttattgacattatcagaataaaagaatagaatataattgttgagagataagaggtttaagtgattatggttaagaagttagttggttatgtcagggtcagtagtgaatcgcaagaggataacactagcttacagaatcagatagagagaattgaagcatattgtatggcttttggttatgagttggtaaaaatattcaaagaggttgccactggtacaaaagcagatattgaaacccgtcctatttttaatgaagctatagaatacttgaaacaggataatgctaatggaattattgccttgaagctagaccgaatcgcacggaatgctttagatgtattgcgtttggttcgtgaaaccttagaaccacaaaataaaatgttagtgttactagatattcaggtagatacttcgacaccttcaggaaaaatgattttaactgtaatgagtgccgttgctgaactcgaaagagacatgatctatgatcgcactcaggggggtagaaagactaaagcccaaaagggcgggtatgcctacgggaaacctaaatttggctataagactgaagaaaaggaactaaaagaagattcagcacaacaggaaactattaaactaattaagagacaccgtaggtcagggaaaagctaccagaaaatagctgattatctcaatgcccaaagtattcccactaaacaaggtaagaaatggagttctagcgtcgtctatcgaatctgtcaggaaaaagctggttaagtctgtttatagatatttagaatttattgaataaaaatagtatgaacaataaatatttatggactaaccacgctcggaaacgtttaactgaacgatgggaaataaaagaatcatgggttattgataccatcgaaaatcctgaacgttcagaatttattgttgatgagtcaggggaaaaatatcattactataaaagaatagctaagtttaagaatagagtgttagaagtgataacttctgccaactcaacacccacaagaataataaccttttactttaaccgtaacatgaggaaaaatttatgattgttacttacgataatgaagttgacgcaatttattttaagttaacggaaaataaaattgatagcaccgaacctcaaacagacaggattatcattgattacgatgaaagtaataatattgttggcattgaggtattagattttaattatcttgtcaagaaaggtttaaccgttgctgatttacctttttctgaagatgaaagattaacagcttctcaatattttaattttcctgttgctatctaatccagaaggggcaataatccccttctttcatcgagttagacttaatatcacaaaagtcattttcattttaccgtttcttttccacagcgtccgtacgcccctcgttaaatctcaaaaccgacaatttatgatgtttataaaaagttactcactttaataagtatttatactcattaaagggttattctttttttgtagcctgataggttgggaaggaatatttcagattatcagatttgttgaatatttttcgtcagatacgcaaaccttacaaacataattaacaactgaaactattgatatgtctaggttttagctctatcacaggttggatctg

SEQ ID NO: 86 - DNA, 13099 bp, Cyanobacterium sp. ABICyano1
tcgacaattaataacttcttcctgtacgggcgaatggccatttgctcctaactaactccgtactgctttgcggaacgagcgtagcgaactctccgaattactaagccttcatccctgatagatgcaaaaaacgaattaaaattatgtgtaaaaagaaaatgtgtctttatttagtagtcaaagttacaaaatattaagaatcaaattaataatgtattgggcagttaagtatataagtctttaaatatttatttgtattcaatatattaaccgaggacaaattatgaattcttataccgtgggtacttatttagccgaacgcttagtgcaaattggtttaaaacatcattttgccgtggctggggactataatttagtgttattggataacttattattaaataaaaacatggaacaagtgtattgttgtaatgaattaaattgtggtttttctgctgaaggttatgctagagctaaaggtgcagctgctgctgttgttacttattctgtgggtgctttatctgcttttgatgctattggtggtgcttatgccgaaaatttacccgtgattttaatttctggtgcccctaataataatgatcatgccgctggacatgttttacatcatgccttaggtaaaaccgattatcattatcaattagaaatggccaaaaatattactgctgctgccgaagctatttatactcctgaagaagcccctgccaaaattgatcatgtgattaaaaccgccttacgcgaaaaaaaacccgtgtatttagaaattgcctgtaatattgcttctatgccttgtgctgctcctgggcctgcttctgctttatttaatgatgaagcctctgatgaagctagtttaaatgctgccgtggaagaaaccttaaaatttattgccaatcgcgataaagttgccgtgttagttggttctaaattaagagctgctggtgctgaagaagctgctgttaaatttgctgatgctttaggtggtgcagttgctactatggctgctgccaaatctttttttcccgaagaaaatccccattatattggaactagttggggagaagtttcttatcctggtgtggaaaaaactatgaaagaagccgacgctgttattgctttagcccctgtgtttaatgattattctaccactggttggactgatattcccgatcccaaaaaattagttttagccgaacctcgttctgttgttgttaatggtgttcgctttccctctgtgcatttaaaagattatttaacccgcttagcccaaaaagtttctaaaaaaactggtgccttagatttttttaaatctttaaatgcgggtgaattaaaaaaagctgctcctgctgatccttctgctcctttagttaatgctgaaattgcccgtcaagttgaagccttattaacccctaatactaccgttattgccgaaactggtgattcttggtttaatgcccaacgcatgaaattacctaatggtgcccgtgttgaatatgaaatgcaatggggtcatattggttggtctgtacctgctgcttttggttatgctgttggtgctcctgaacgtcgtaatattttaatggtgggtgatggttcttttcaattaactgcccaagaagttgcccaaatggttcgcttaaaattacccgttattatttttttaataaataattatggttataccattgaagtgatgattcatgatgggccatataataatattaaaaattgggattatgcgggtttaatggaagtgtttaatggtaatggtggttatgattctggtgctggtaaaggtttaaaagccaaaactggtggtgaattagctgaagctattaaagttgccttagccaatactgatgggccaaccttaattgaatgttttattggtcgcgaagattgtaccgaagaattagttaaatggggtaaacgtgttgctgctgctaattctcgcaaacccgtgaataaattattgtaaggatccagcaagtttcatcccgaccccctcagggtcgggatttttttattgtgagctcaactttagatattcgtagttggcaatgtcgtaaatgcggaacaatacatggaaaacatatagatttgtaatgagaaaaagtgtaaacaaatattaagaaaaagatcagaaaaatttaacaacacgtaataaaaaaatgcgtcactacgggttataaatttacatgaaaggttaaaacacttttctgagacgattttgataaaaaagttgtcaaaaaattaagtttctttacaaatgcttaacaaaaacttggttttaagcacaaaataagagagactaatttgcagaagttttacaaggaaatcttgaagaaaaagatctaagtaaaacgactctgtttaaccaaaatttaacaaatttaacaaaacaaactaaatctattaggagattaactacatatggttatccaggcttacgctgctcatgaaaaaggtggagagttaaaaccttttgagtatgatcccggtgtattaggtgaagaagaagtagaaatcaatgtagaatactgtggtatttgtcacagtgacttatctatgttagataacgagtggcagatgagtgaatatcccttagttcctggacacgaggttgtaggtactgttggtgctgtaggtaacggtgtagaaaccttatctgtaggtcagaaagtaggtttaggttggtttagtcgtagttgttttaactgtgaatggtgtattggtggagatcagaatttatgtcgtaccgctgaaggaactatcgttggaagacatggaggttttgctaacaaagttcgtgctcatcatcgttgggtaacccccttacccagtgaaatcaatttagagactgctggtcccttattctgtggtggtatcactgtttttaatcccatcattcaatgtggagtaaaacctaccgagcgtgttggtgttattggtatcggtggattaggtcatttagcaatccaatttttacatgcttggggatgtgaggtaactgctttttcttcttctcccgaaaaagaagcagaagccagacaattaggagccgatcactttatcaattctcgtgaatctaatgccttagaaagtgtagaaaattctttcgattttatcattagtaccgttaatgttgatttagactggaacggttatgttaatgctttacgtcccaaaggaagattacattttgtaggtgtaatccctaatcctttatctatccaaattttccctttattagtaggtcaaaaatctattagtagttctcccttaggatctcccattactattgcccaaatgttagactttgcaactcgtcatcatattgaacctatgattgaattattttctttagaaaaagttaacgaagccttaactaaattaaaacaaggtcaacctcgttatcgtttagtattaaaagtttaactagatcttccggatggctcgagtttttcagcaagataagatctacttctaaactgaaacaaatttgagggtaggcttcattgtctgcccttatttttttatttaggaaaagtgaacagactaaagagtgttggctctattgctttgagtatgtaaattaggcgttgctgaattaaggtatgatttttgacccctgcaggatcatcttgctgaaaaactcgagcgctcgttccgcaaagcggtacggagttagttaggggctaatgggcattctcccgtacaggaaagagttagaagttattaattatcaacaattctcctttgcctagtgcatcgttacctttttaattaaaacataaggaaaactaataatcgtaataatttaacctcaaagtgtaaagaaatgtgaaattctgacttttataacgttaaagagggaaaaattagcagtttaaaatacctagagaatagtctggggtaagcatagagaattagattagttaagttaatcaaattcagaaaaaataataatcgtaaatagttaatctgggtgtatagaaaatgatccccttcatgataagatttaaactcgaaaagcaaaagccaaaaaactaacttccattaaaagaagttgttacatataacgctataaagaaaatttatatatttggaggataccaaccatgtctcatattcaacgtgaaactagttgttctcgccctcgtttaaattctaatatggatgccgatttatatggttataaatgggctcgtgataatgttggtcaatctggtgctactatttatcgtttatatggtaaacctgatgctcctgaattattcttgaaacatggtaaaggttctgttgctaatgatgttactgatgaaatggttcgtttaaactggttgactgaatttatgcctttacctactattaaacattttattcgtactcccgatgatgcttggttattaactactgctattcctggtaaaactgcttttcaagttttagaagaatatcctgattctggtgaaaatattgttgatgctttagctgtttttttacgtcgtttacattctattcccgtttgtaattgtccttttaattctgatcgtgtttttcgtttagctcaagctcaatctcgtatgaataatggtttagttgatgcttctgattttgatgatgaacgtaatggttggcctgttgaacaagtttggaaagaaatgcacaaattgttacctttttctcctgattctgttgttactcatggtgatttttctttagataatttgatctttgatgaaggtaaattgattggttgtattgatgttggtcgtgttggtattgctgatcgttatcaagatttagctattttatggaattgtttaggtgaattttctccttctttacagaaacgtttatttcagaaatatggtattgataatcctgatatgaacaagttacaatttcatttaatgttggacgagttcttttaagaattaattcatgaccaaaatcccttaacgtgagttttcgttccactgagcgtcagaccccgtagaaaagatcaaaggatcttcttgagatcctttttttctgcgcgtaatctgctgctatttaaattacgtacacgtgttattactttgttaacgacaattgtcttaattaactgggcctcatgggccttccgctcactgcccgctttccagtcgggaaacctgtcgtgccagctctgcagatgacggtgaaaacctctgacacatgcagctcccggagacggtcacagcttgtctgtaagcggatgccgggagcagacaagcccgtcagggcgcgtcagcgggtgttggcgggtgtcggggcgcagccatgacccagtcacgtagcgatagcggagtgtatactggcttaactatgcggcatcagagcagattgtactgagagtgcaccatatgcggtgtgaaataccgcacagatgcgtaaggagaaaataccgcatcaggcgctcttccgcttcctcgctcactgactcgctgcgctcggtcgttcggctgcggcgagcggtatcagctcactcaaaggcggtaatacggttatccacagaatcaggggataacgcaggaaagaacatgtgagcaaaaggccagcaaaaggccaggaaccgtaaaaaggccgcgttgctggcgtttttccataggctccgcccccctgacgagcatcacaaaaatcgacgctcaagtcagaggtggcgaaacccgacaggactataaagataccaggcgtttccccctggaagctccctcgtgcgctctcctgttccgaccctgccgcttaccggatacctgtccgcctttctcccttcgggaagcgtggcgctttctcatagctcacgctgtaggtatctcagttcggtgtaggtcgttcgctccaagctgggctgtgtgcacgaaccccccgttcagcccgaccgctgcgccttatccggtaactatcgtcttgagtccaacccggtaagacacgacttatcgccactggcagcagccactggtaacaggattagcagagcgaggtatgtaggcggtgctacagagttcttgaagtggtggcctaactacggctacactagaaggacagtatttggtatctgcgctctgctgaagccagttaccttcggaaaaagagttggtagctcttgatccggcaaacaaaccaccgctggtagcggtggtttttttgtttgcaagcagcagattacgcgcagaaaaaaaggatctcaagaagatcctttgatcttttctactgcagaagcttgttagacaccctgtcatgtattttatattatttatttcaccatacggattaagtgaaacctaatgaaaatagtactttcggagctttaactttaatgaaggtatgtttttttatagacatcgatgtctggtttaacaataggaaaaagtagctaaaactcccatgaattaaagaaataacaaggtgtctaacaacctgttattaagaatgttagaaaagacttaacatttgtgttgagtttttatagacattggtgtctagacatacggtagataaggtttgctcaaaaataaaataaaaaaagattggactaaaaaacatttaatttagtacaatttaattagttattttttcgtctcaaattttgctttgttgagcagaaatttagataaaaaaatccccgtgatcagattacaatgtcgttcattgtacgatgtgtcgaaaaatctttacgacactctaaactgaccacacgggggaaaaagaaaactgaactaataacatcatgatactcggaaaacctagcaattctcaacccctaaacaaaagaaacttccaaaaccctgaccatataaaggagtggcaacaatcagcaatcagtcaagatttgatagcagaaaatcttgtatcggttgctaatggttttgatgtactatttatcggcaataaataccgaactaacacgggtgttctgtcacggcacatattaaactcctattctcatttagaagatggtggttcgtatggtagaacatttgacccatttaccaataaagaaatgcagtgggttcaatttaaaccgaatagaccaagaaaaggttctactggtaaggtaatcaaatatgaatcgccaaaaggtgaacctacaagagttctaatgccgtttgtgcctatgaaaatatggcaacggattagcgataagttcggagtaccgattaatccgaaaaaagatactcacttttgggaatgggtaaagaataatccatcgataccgattgccattacagaaggaaataaaaaagctaattgcctattatcctatggctatcctgctattgcctttgtaggcatttggaacggattagagaaaataaatgatttctcgaaggaaaagcagttaaaagaggatttgaaatggttgttatccaacggcaaccgaaatattaatatcatctttgaccaagaccagaaacaaaaaactgtaattaatgtaaacaaagctattttcgctttatcttctctaataagtagaaatggtcataaagttaatattgtgcaatggttgccgtcaaaaggtaaaggaatagatgattatttggtagctttaccttttgagaaaagagaaaatcatttagacaacttaattaaaattgcaccatcatttaatttttggtcaactaaatacttattcaagtgtcgtaaaccagatttaaccgtaaattgccgttatttgagcgatgcagtaaaagaattacctcaagaggatatagcattaatagcacctcacggcacgggtaaaacttcattagtagctactcacgttaagaatcggagttatcacggaaggaaaactatttcattggtgcatcttgaaagtttagccaaagctaatggcaacgcacttggattatattaccgaaccgaaaataatattgaaaagcaatatcttggatttagcttatgtgtagatagttgccgtgataagattaacggcattacaactgatattatttcaggtcaagattattgccttttcattgatgaaattgaccaagtaattccacacatccttaacagtgaaactgaagtaagtaagtatagatgcaccatcattgacactttttctgaactggtgagaaatgctgaacaggtcattattgctgatgctgatttatccgatgtgacgattgacctaatagaaaacatcagaggtaaaaaactatatgtaatcaagaatgaatatcagtatcagggaatgacttttaacgccgttggttcaccattagaaatgatggcaatgatgggaaaatcggtgtcagaaggcaagaaattatttattaacaccacatcccaaaaggcaaaaagtaagtacggcacaatcgctcttgagtcttatatttttggtctaaataaagaagcaaagatattaagaatagactctgaaaccactaaaaaccctgaacatccagcctataaaatcattgaccaagacttaaataatatcctcaaagattatgattatgtcattgcctcaccttgccttcaaacaggtgtcagtattaccttaaaagggcattttgaccagcaatttaacttttccagtggaaacattacacctcattgctttttacagcaaatgtggcggttgagggatgcagaaattgaaagattctattatgtgccgaactcatctaacctcaatctcattgggaataagtcaagttcaccatcagaccttctaaagagcaataacaagatggcaacggcaacggttaaccttttgggtagaatcgactccgaatattccctagagtatgaatcgcacggcatttggcttgagacgtgggcaaaattatcagcacggcataacagttcaatgcgttgttactctgaaattcttacctatctaattacgtctcaagggcataaattaaatatcaacattccctcacctcttgcagatattaagaagctaaatgatgaggtaagtagtaacagggaaaaggtaaaaaatgagagatactctcagaggttaaactcaccagatattaacgatgcagaagctaccatactcgaatctaaagagcaaaaaatcggattgactctcaatgagagatgcaccctagaaaagcataaagttaagaagcggtatgggaatgtaaagatggatattctcacctttgatgatgatggactataccccaaactcagactattttattacctcaccatcggtaaacctcatctcaaggctaatgacagaaaagctattgccaaaatgggcaatgacaataaaggcaagattctatcaaaagacttagttaataaaacttactccgctcgtgtgaaggtcttagagattcttaaactaactgactttatcgacaatcttagagatgaactcttaataactcccaataatccagctatcaccgattttaataatcttctgctaagagctaagaaggatttaagagtattaggagtcaacatcggaaaatatccaatggccaacattaatgccgtacttactctcattggtcacaaactttctgtaatgagagatgagttcggaaaagagaaaaggataaaagtagatggtaaatcataccgatgttatcaacttgaaacattaccagattttaccaatgatactcttgactactggttagaaaatgatagccaaaaagaagtaacagcaacagaaaattactccgaaaattttaacccttcaaatagctacaatccagacagtaagacactttcagagggtgcaaatttcctatatataaataaagaagaattgcatccaaataaattgcacctagaaataaaagaaggtgctgaactttttttattcggggtaaaggtgattgtgaaaggaatcttggacggggcagtaactatattctctatgggtcaagaatacgatttatccctcaatgaactagaggggatgttaacatcatgaactttacaagaatctttttaaagggcgatcgcaccatgttaaatgatggtacatttgttcagatatttgatatttaccatgaccacgcattgggagtgacccttgaccttaagacagaaaaaattatttccgatgatgttagggtaattactgtcaaagacttattgttcgatggcacttataaaggggtaaaatcttttatgcccgataatgcccgataatgcccgattgatgctacaaaatcccataatcataagcgataatcccctaatagcttgtaattcttgaaccgtagcgattttagagtattccaaaaagaagaaataaacaccgcaaaatgtcgtatttcacatatataaaccaaggttttttgccctaaaatctttatgtttgtagtgtgatgttgggtcaaaatggtcagaaaagttgcaaggtttttatggatgcttacgcgcgcgaggggtaagcatccccaaatagttactttatcctagtccatgcccatttattgccgtcccgttcggctttaaaaaagtgccaaaactcacaaggtgcaataaaaagttctgtacctttcgcaaccctagataatctttcaacagttactttttttcctattatctcggtacaaagtttggctagtttctcttttccctctttttcaatcaagccttcttgtatgcccaactcattgattaatctctctatttttaccattatttcccgttcaggtagtttatcccctaaatcttcatcggggggcaatgtagggcattctgaaggggctttttcttctgtctggacattatctaatattgaagtaaccaaactatcttcagttttttctattcctattaattcatattcggttactgtatccgtatcaatatccgaataactatctttatccgtattagctattcggttaagtttatccgttaactcagaaacaagactatatagcggttttagcttttcttctatcctgttatctaatacggataagtttatacggttatcattatccgtattagtatcattgggcttttttggtagttctaccccctcataaaccgcttttattcccaattccaacagactgataacagtatcctttataatgggttttttgctgatatggtgaacttttgccccttccatcattgcgatactttctatctcactcatcaacttatcgcttaagtgaatctcgtatctgtttaatcccttactggttttattcatatccgtttactttattcggttaacaattctattttatacgaataaaatattatacggttaactttatacgtttaactattttatctatacggataacagtaataagttattcgtattagttatacgtttacttttatccaaataaaattagtgcatttaaactaaaagaatgattttatcggagttgatagcattggattaacctaaagatgtttataagctatatctgataagtatttaaggttattttgttattctgtttattgacattatcagaataaaagaatagaatataattgttgagagataagaggtttaagtgattatggttaagaagttagttggttatgtcagggtcagtagtgaatcgcaagaggataacactagcttacagaatcagatagagagaattgaagcatattgtatggcttttggttatgagttggtaaaaatattcaaagaggttgccactggtacaaaagcagatattgaaacccgtcctatttttaatgaagctatagaatacttgaaacaggataatgctaatggaattattgccttgaagctagaccgaatcgcacggaatgctttagatgtattgcgtttggttcgtgaaaccttagaaccacaaaataaaatgttagtgttactagatattcaggtagatacttcgacaccttcaggaaaaatgattttaactgtaatgagtgccgttgctgaactcgaaagagacatgatctatgatcgcactcaggggggtagaaagactaaagcccaaaagggcgggtatgcctacgggaaacctaaatttggctataagactgaagaaaaggaactaaaagaagattcagcacaacaggaaactattaaactaattaagagacaccgtaggtcagggaaaagctaccagaaaatagctgattatctcaatgcccaaagtattcccactaaacaaggtaagaaatggagttctagcgtcgtctatcgaatctgtcaggaaaaagctggttaagtctgtttatagatatttagaatttattgaataaaaatagtatgaacaataaatatttatggactaaccacgctcggaaacgtttaactgaacgatgggaaataaaagaatcatgggttattgataccatcgaaaatcctgaacgttcagaatttattgttgatgagtcaggggaaaaatatcattactataaaagaatagctaagtttaagaatagagtgttagaagtgataacttctgccaactcaacacccacaagaataataaccttttactttaaccgtaacatgaggaaaaatttatgattgttacttacgataatgaagttgacgcaatttattttaagttaacggaaaataaaattgatagcaccgaacctcaaacagacaggattatcattgattacgatgaaagtaataatattgttggcattgaggtattagattttaattatcttgtcaagaaaggtttaaccgttgctgatttacctttttctgaagatgaaagattaacagcttctcaatattttaattttcctgttgctatctaatccagaaggggcaataatccccttctttcatcgagttagacttaatatcacaaaagtcattttcattttaccgtttcttttccacagcgtccgtacgcccctcgttaaatctcaaaaccgacaatttatgatgtttataaaaagttactcactttaataagtatttatactcattaaagggttattctttttttgtagcctgataggttgggaaggaatatttcagattatcagatttgttgaatatttttcgtcagatacgcaaaccttacaaacataattaacaactgaaactattgatatgtctaggttttagctctatcacaggttggatctg

SEQ ID NO: 87 - DNA, 12983 bp, Cyanobacterium sp. ABICyano1
tcgacaattaataacttcttcctgtacgggcgaatggccatttgctcctaactaactccgtactgctttgcggaacgagcgtagcgaactctccgaattactaagccttcatccctgatagatgcaaaaaacgaattaaaattatgtgtaaaaagaaaatgtgtctttatttagtagtcaaagttacaaaatattaagaatcaaattaataatgtattgggcagttaagtatataagtctttaaatatttatttgtattcaatatattaaccgaggacaaattatgaattcttataccgtgggtacttatttagccgaacgcttagtgcaaattggtttaaaacatcattttgccgtggctggggactataatttagtgttattggataacttattattaaataaaaacatggaacaagtgtattgttgtaatgaattaaattgtggtttttctgctgaaggttatgctagagctaaaggtgcagctgctgctgttgttacttattctgtgggtgctttatctgcttttgatgctattggtggtgcttatgccgaaaatttacccgtgattttaatttctggtgcccctaataataatgatcatgccgctggacatgttttacatcatgccttaggtaaaaccgattatcattatcaattagaaatggccaaaaatattactgctgctgccgaagctatttatactcctgaagaagcccctgccaaaattgatcatgtgattaaaaccgccttacgcgaaaaaaaacccgtgtatttagaaattgcctgtaatattgcttctatgccttgtgctgctcctgggcctgcttctgctttatttaatgatgaagcctctgatgaagctagtttaaatgctgccgtggaagaaaccttaaaatttattgccaatcgcgataaagttgccgtgttagttggttctaaattaagagctgctggtgctgaagaagctgctgttaaatttgctgatgctttaggtggtgcagttgctactatggctgctgccaaatctttttttcccgaagaaaatccccattatattggaactagttggggagaagtttcttatcctggtgtggaaaaaactatgaaagaagccgacgctgttattgctttagcccctgtgtttaatgattattctaccactggttggactgatattcccgatcccaaaaaattagttttagccgaacctcgttctgttgttgttaatggtgttcgctttccctctgtgcatttaaaagattatttaacccgcttagcccaaaaagtttctaaaaaaactggtgccttagatttttttaaatctttaaatgcgggtgaattaaaaaaagctgctcctgctgatccttctgctcctttagttaatgctgaaattgcccgtcaagttgaagccttattaacccctaatactaccgttattgccgaaactggtgattcttggtttaatgcccaacgcatgaaattacctaatggtgcccgtgttgaatatgaaatgcaatggggtcatattggttggtctgtacctgctgcttttggttatgctgttggtgctcctgaacgtcgtaatattttaatggtgggtgatggttcttttcaattaactgcccaagaagttgcccaaatggttcgcttaaaattacccgttattatttttttaataaataattatggttataccattgaagtgatgattcatgatgggccatataataatattaaaaattgggattatgcgggtttaatggaagtgtttaatggtaatggtggttatgattctggtgctggtaaaggtttaaaagccaaaactggtggtgaattagctgaagctattaaagttgccttagccaatactgatgggccaaccttaattgaatgttttattggtcgcgaagattgtaccgaagaattagttaaatggggtaaacgtgttgctgctgctaattctcgcaaacccgtgaataaattattgtaaggatccagcaaggtttcatcccgaccccctcagggtcgggatttttttattgtgagctcaactttagatattcgtagttggcaatgtcgtaaatgcggaacaatacatggaaaacatatagatttgtaatgagaaaaagtgtaaacaaatattaagaaaaagatcagaaaaatttaacaacacgtaataaaaaaatgcgtcactacgggttataaatttacatgaaaggttaaaacacttttctgagacgattttgataaaaaagttgtcaaaaaattaagtttctttacaaatgcttaacaaaaacttggttttaagcacaaaataagagagactaatttgcagaagttttacaaggaaatcttgaagaaaaagatctaagtaaaacgactctgtttaaccaaaatttaacaaatttaacaaaacaaactaaatctattaggagattaactacatatgattagagcctatgctgcccaagaaaaagggggaaaactagagccttttgactacgatccgggcatattagcggatgaagatgtagaaatcgcggtggaatattgcggcatctgccacagtgacctaagtatgctcgataacgattggggactgaccacctatccctttgtccctggccatgaagtggtcggcacgatcgccgctcttggtgctaaagtcaaagagttaaaattagggcaaagagtcggtctcggttggttttcccgttcctgttccacctgtgaaacctgtatgtcaggggatcaaaacctttgtgctactgccgaaggaactatcgtcggtcgccatggcggttttgccgaaagagtccgggcccatcatagttggttagttcccttgccggaccagttagatgctgccaaagctggcccgcttttctgtggtggcattaccgtctttaatccgattgtccaatttaatattaaacccacggcccgagttggtgtcattggtattggtggattgggccatatagccttaaaattcctcaaagcttggggctgcgaagtaaccgctttttccagtagtcccgacaaagaaacggaagcaaaagaactaggagcgactcattttatcaattccagagaccccgaagctttgcaatcggtacaaaattactttgattttatcatctctaccgttaacgttaatctcgattggggtctttatatcgcctgtttacgacccaaaggtcgcctgcatattgttggcgctgttcttgaacccatggctacctacgcttttcccttgattatgggtcaaaaatcgatttccggcagtcctttgggtagtcccagtaccgtcagtaaaatgattgaatttgcctctcgccatggcattgaaccagtcacagaaacctatcctatctcccgggtgaatgaagccatggaaaaattgcgaaccggacaacctaaatatcgcctcgtcttgcaaataaaataactagatctcctgcagagaatataaaaagccagattattaatccggcttttttattatttaaatactgtgcacgatcctgcaggatcatcttgctgaaaaactcgagcgctcgttccgcaaagcggtacggagttagttaggggctaatgggcattctcccgtacaggaaagagttagaagttattaattatcaacaattctcctttgcctagtgcatcgttacctttttaattaaaacataaggaaaactaataatcgtaataatttaacctcaaagtgtaaagaaatgtgaaattctgacttttataacgttaaagagggaaaaattagcagtttaaaatacctagagaatagtctggggtaagcatagagaattagattagttaagttaatcaaattcagaaaaaataataatcgtaaatagttaatctgggtgtatagaaaatgatccccttcatgataagatttaaactcgaaaagcaaaagccaaaaaactaacttccattaaaagaagttgttacatataacgctataaagaaaatttatatatttggaggataccaaccatgtctcatattcaacgtgaaactagttgttctcgccctcgtttaaattctaatatggatgccgatttatatggttataaatgggctcgtgataatgttggtcaatctggtgctactatttatcgtttatatggtaaacctgatgctcctgaattattcttgaaacatggtaaaggttctgttgctaatgatgttactgatgaaatggttcgtttaaactggttgactgaatttatgcctttacctactattaaacattttattcgtactcccgatgatgcttggttattaactactgctattcctggtaaaactgcttttcaagttttagaagaatatcctgattctggtgaaaatattgttgatgctttagctgtttttttacgtcgtttacattctattcccgtttgtaattgtccttttaattctgatcgtgtttttcgtttagctcaagctcaatctcgtatgaataatggtttagttgatgcttctgattttgatgatgaacgtaatggttggcctgttgaacaagtttggaaagaaatgcacaaattgttacctttttctcctgattctgttgttactcatggtgatttttctttagataatttgatctttgatgaaggtaaattgattggttgtattgatgttggtcgtgttggtattgctgatcgttatcaagatttagctattttatggaattgtttaggtgaattttctccttctttacagaaacgtttatttcagaaatatggtattgataatcctgatatgaacaagttacaatttcatttaatgttggacgagttcttttaagaattaattcatgaccaaaatcccttaacgtgagttttcgttccactgagcgtcagaccccgtagaaaagatcaaaggatcttcttgagatcctttttttctgcgcgtaatctgctgctatttaaattacgtacacgtgttattactttgttaacgacaattgtcttaattaactgggcctcatgggccttccgctcactgcccgctttccagtcgggaaacctgtcgtgccagctctgcagatgacggtgaaaacctctgacacatgcagctcccggagacggtcacagcttgtctgtaagcggatgccgggagcagacaagcccgtcagggcgcgtcagcgggtgttggcgggtgtcggggcgcagccatgacccagtcacgtagcgatagcggagtgtatactggcttaactatgcggcatcagagcagattgtactgagagtgcaccatatgcggtgtgaaataccgcacagatgcgtaaggagaaaataccgcatcaggcgctcttccgcttcctcgctcactgactcgctgcgctcggtcgttcggctgcggcgagcggtatcagctcactcaaaggcggtaatacggttatccacagaatcaggggataacgcaggaaagaacatgtgagcaaaaggccagcaaaaggccaggaaccgtaaaaaggccgcgttgctggcgtttttccataggctccgcccccctgacgagcatcacaaaaatcgacgctcaagtcagaggtggcgaaacccgacaggactataaagataccaggcgtttccccctggaagctccctcgtgcgctctcctgttccgaccctgccgcttaccggatacctgtccgcctttctcccttcgggaagcgtggcgctttctcatagctcacgctgtaggtatctcagttcggtgtaggtcgttcgctccaagctgggctgtgtgcacgaaccccccgttcagcccgaccgctgcgccttatccggtaactatcgtcttgagtccaacccggtaagacacgacttatcgccactggcagcagccactggtaacaggattagcagagcgaggtatgtaggcggtgctacagagttcttgaagtggtggcctaactacggctacactagaaggacagtatttggtatctgcgctctgctgaagccagttaccttcggaaaaagagttggtagctcttgatccggcaaacaaaccaccgctggtagcggtggtttttttgtttgcaagcagcagattacgcgcagaaaaaaaggatctcaagaagatcctttgatcttttctactgcagaagcttgttagacaccctgtcatgtattttatattatttatttcaccatacggattaagtgaaacctaatgaaaatagtactttcggagctttaactttaatgaaggtatgtttttttatagacatcgatgtctggtttaacaataggaaaaagtagctaaaactcccatgaattaaagaaataacaaggtgtctaacaacctgttattaagaatgttagaaaagacttaacatttgtgttgagtttttatagacattggtgtctagacatacggtagataaggtttgctcaaaaataaaataaaaaaagattggactaaaaaacatttaatttagtacaatttaattagttattttttcgtctcaaattttgctttgttgagcagaaatttagataaaaaaatccccgtgatcagattacaatgtcgttcattgtacgatgtgtcgaaaaatctttacgacactctaaactgaccacacgggggaaaaagaaaactgaactaataacatcatgatactcggaaaacctagcaattctcaacccctaaacaaaagaaacttccaaaaccctgaccatataaaggagtggcaacaatcagcaatcagtcaagatttgatagcagaaaatcttgtatcggttgctaatggttttgatgtactatttatcggcaataaataccgaactaacacgggtgttctgtcacggcacatattaaactcctattctcatttagaagatggtggttcgtatggtagaacatttgacccatttaccaataaagaaatgcagtgggttcaatttaaaccgaatagaccaagaaaaggttctactggtaaggtaatcaaatatgaatcgccaaaaggtgaacctacaagagttctaatgccgtttgtgcctatgaaaatatggcaacggattagcgataagttcggagtaccgattaatccgaaaaaagatactcacttttgggaatgggtaaagaataatccatcgataccgattgccattacagaaggaaataaaaaagctaattgcctattatcctatggctatcctgctattgcctttgtaggcatttggaacggattagagaaaataaatgatttctcgaaggaaaagcagttaaaagaggatttgaaatggttgttatccaacggcaaccgaaatattaatatcatctttgaccaagaccagaaacaaaaaactgtaattaatgtaaacaaagctattttcgctttatcttctctaataagtagaaatggtcataaagttaatattgtgcaatggttgccgtcaaaaggtaaaggaatagatgattatttggtagctttaccttttgagaaaagagaaaatcatttagacaacttaattaaaattgcaccatcatttaatttttggtcaactaaatacttattcaagtgtcgtaaaccagatttaaccgtaaattgccgttatttgagcgatgcagtaaaagaattacctcaagaggatatagcattaatagcacctcacggcacgggtaaaacttcattagtagctactcacgttaagaatcggagttatcacggaaggaaaactatttcattggtgcatcttgaaagtttagccaaagctaatggcaacgcacttggattatattaccgaaccgaaaataatattgaaaagcaatatcttggatttagcttatgtgtagatagttgccgtgataagattaacggcattacaactgatattatttcaggtcaagattattgccttttcattgatgaaattgaccaagtaattccacacatccttaacagtgaaactgaagtaagtaagtatagatgcaccatcattgacactttttctgaactggtgagaaatgctgaacaggtcattattgctgatgctgatttatccgatgtgacgattgacctaatagaaaacatcagaggtaaaaaactatatgtaatcaagaatgaatatcagtatcagggaatgacttttaacgccgttggttcaccattagaaatgatggcaatgatgggaaaatcggtgtcagaaggcaagaaattatttattaacaccacatcccaaaaggcaaaaagtaagtacggcacaatcgctcttgagtcttatatttttggtctaaataaagaagcaaagatattaagaatagactctgaaaccactaaaaaccctgaacatccagcctataaaatcattgaccaagacttaaataatatcctcaaagattatgattatgtcattgcctcaccttgccttcaaacaggtgtcagtattaccttaaaagggcattttgaccagcaatttaacttttccagtggaaacattacacctcattgctttttacagcaaatgtggcggttgagggatgcagaaattgaaagattctattatgtgccgaactcatctaacctcaatctcattgggaataagtcaagttcaccatcagaccttctaaagagcaataacaagatggcaacggcaacggttaaccttttgggtagaatcgactccgaatattccctagagtatgaatcgcacggcatttggcttgagacgtgggcaaaattatcagcacggcataacagttcaatgcgttgttactctgaaattcttacctatctaattacgtctcaagggcataaattaaatatcaacattccctcacctcttgcagatattaagaagctaaatgatgaggtaagtagtaacagggaaaaggtaaaaaatgagagatactctcagaggttaaactcaccagatattaacgatgcagaagctaccatactcgaatctaaagagcaaaaaatcggattgactctcaatgagagatgcaccctagaaaagcataaagttaagaagcggtatgggaatgtaaagatggatattctcacctttgatgatgatggactataccccaaactcagactattttattacctcaccatcggtaaacctcatctcaaggctaatgacagaaaagctattgccaaaatgggcaatgacaataaaggcaagattctatcaaaagacttagttaataaaacttactccgctcgtgtgaaggtcttagagattcttaaactaactgactttatcgacaatcttagagatgaactcttaataactcccaataatccagctatcaccgattttaataatcttctgctaagagctaagaaggatttaagagtattaggagtcaacatcggaaaatatccaatggccaacattaatgccgtacttactctcattggtcacaaactttctgtaatgagagatgagttcggaaaagagaaaaggataaaagtagatggtaaatcataccgatgttatcaacttgaaacattaccagattttaccaatgatactcttgactactggttagaaaatgatagccaaaaagaagtaacagcaacagaaaattactccgaaaattttaacccttcaaatagctacaatccagacagtaagacactttcagagggtgcaaatttcctatatataaataaagaagaattgcatccaaataaattgcacctagaaataaaagaaggtgctgaactttttttattcggggtaaaggtgattgtgaaaggaatcttggacggggcagtaactatattctctatgggtcaagaatacgatttatccctcaatgaactagaggggatgttaacatcatgaactttacaagaatctttttaaagggcgatcgcaccatgttaaatgatggtacatttgttcagatatttgatatttaccatgaccacgcattgggagtgacccttgaccttaagacagaaaaaattatttccgatgatgttagggtaattactgtcaaagacttattgttcgatggcacttataaaggggtaaaatcttttatgcccgataatgcccgataatgcccgattgatgctacaaaatcccataatcataagcgataatcccctaatagcttgtaattcttgaaccgtagcgattttagagtattccaaaaagaagaaataaacaccgcaaaatgtcgtatttcacatatataaaccaaggttttttgccctaaaatctttatgtttgtagtgtgatgttgggtcaaaatggtcagaaaagttgcaaggtttttatggatgcttacgcgcgcgaggggtaagcatccccaaatagttactttatcctagtccatgcccatttattgccgtcccgttcggctttaaaaaagtgccaaaactcacaaggtgcaataaaaagttctgtacctttcgcaaccctagataatctttcaacagttactttttttcctattatctcggtacaaagtttggctagtttctcttttccctctttttcaatcaagccttcttgtatgcccaactcattgattaatctctctatttttaccattatttcccgttcaggtagtttatcccctaaatcttcatcggggggcaatgtagggcattctgaaggggctttttcttctgtctggacattatctaatattgaagtaaccaaactatcttcagttttttctattcctattaattcatattcggttactgtatccgtatcaatatccgaataactatctttatccgtattagctattcggttaagtttatccgttaactcagaaacaagactatatagcggttttagcttttcttctatcctgttatctaatacggataagtttatacggttatcattatccgtattagtatcattgggcttttttggtagttctaccccctcataaaccgcttttattcccaattccaacagactgataacagtatcctttataatgggttttttgctgatatggtgaacttttgccccttccatcattgcgatactttctatctcactcatcaacttatcgcttaagtgaatctcgtatctgtttaatcccttactggttttattcatatccgtttactttattcggttaacaattctattttatacgaataaaatattatacggttaactttatacgtttaactattttatctatacggataacagtaataagttattcgtattagttatacgtttacttttatccaaataaaattagtgcatttaaactaaaagaatgattttatcggagttgatagcattggattaacctaaagatgtttataagctatatctgataagtatttaaggttattttgttattctgtttattgacattatcagaataaaagaatagaatataattgttgagagataagaggtttaagtgattatggttaagaagttagttggttatgtcagggtcagtagtgaatcgcaagaggataacactagcttacagaatcagatagagagaattgaagcatattgtatggcttttggttatgagttggtaaaaatattcaaagaggttgccactggtacaaaagcagatattgaaacccgtcctatttttaatgaagctatagaatacttgaaacaggataatgctaatggaattattgccttgaagctagaccgaatcgcacggaatgctttagatgtattgcgtttggttcgtgaaaccttagaaccacaaaataaaatgttagtgttactagatattcaggtagatacttcgacaccttcaggaaaaatgattttaactgtaatgagtgccgttgctgaactcgaaagagacatgatctatgatcgcactcaggggggtagaaagactaaagcccaaaagggcgggtatgcctacgggaaacctaaatttggctataagactgaagaaaaggaactaaaagaagattcagcacaacaggaaactattaaactaattaagagacaccgtaggtcagggaaaagctaccagaaaatagctgattatctcaatgcccaaagtattcccactaaacaaggtaagaaatggagttctagcgtcgtctatcgaatctgtcaggaaaaagctggttaagtctgtttatagatatttagaatttattgaataaaaatagtatgaacaataaatatttatggactaaccacgctcggaaacgtttaactgaacgatgggaaataaaagaatcatgggttattgataccatcgaaaatcctgaacgttcagaatttattgttgatgagtcaggggaaaaatatcattactataaaagaatagctaagtttaagaatagagtgttagaagtgataacttctgccaactcaacacccacaagaataataaccttttactttaaccgtaacatgaggaaaaatttatgattgttacttacgataatgaagttgacgcaatttattttaagttaacggaaaataaaattgatagcaccgaacctcaaacagacaggattatcattgattacgatgaaagtaataatattgttggcattgaggtattagattttaattatcttgtcaagaaaggtttaaccgttgctgatttacctttttctgaagatgaaagattaacagcttctcaatattttaattttcctgttgctatctaatccagaaggggcaataatccccttctttcatcgagttagacttaatatcacaaaagtcattttcattttaccgtttcttttccacagcgtccgtacgcccctcgttaaatctcaaaaccgacaatttatgatgtttataaaaagttactcactttaataagtatttatactcattaaagggttattctttttttgtagcctgataggttgggaaggaatatttcagattatcagatttgttgaatatttttcgtcagatacgcaaaccttacaaacataattaacaactgaaactattgatatgtctaggttttagctctatcacaggttggatctg

SEQ ID NO: 88 - DNA, 6388 bp, Cyanobacterium sp. ABICyano1
tcgacttctgcagcgagcgctcgttccgcaaagcggtacggagttagttaggggctaatgggcattctcccgtacaggaaagagttagaagttattaattatcaacaattctcctttgcctagtgcatcgttacctttttaattaaaacataaggaaaactaataatcgtaataatttaacctcaaagtgtaaagaaatgtgaaattctgacttttataacgttaaagagggaaaaattagcagtttaaaatacctagagaatagtctggggtaagcatagagaattagattagttaagttaatcaaattcagaaaaaataataatcgtaaatagttaatctgggtgtatagaaaatgatccccttcatgataagatttaaactcgaaaagcaaaagccaaaaaactaacttccattaaaagaagttgttacatataacgctataaagaaaatttatatatttggaggataccaaccatggctcatattcaacgtgaaactagttgttctcgtcctcgtttaaattctaatatggatgccgatttatatggttataaatgggctcgtgataatgttggtcaatctggtgctactatttatcgtttatatggtaaacctgatgctcctgaattattcttgaaacatggtaaaggttctgttgctaatgatgttactgatgaaatggttcgtttaaactggttgactgaatttatgcctttacctactattaaacattttattcgtactcccgatgatgcttggttattaactactgctattcctggtaaaactgcttttcaagttttagaagaatatcctgattctggtgaaaatattgttgatgctttagctgtttttttacgtcgtttacattctattcccgtttgtaattgtccttttaattctgatcgtgtttttcgtttagctcaagctcaatctcgtatgaataatggtttagttgatgcttctgattttgatgatgaacgtaatggttggcctgttgaacaagtttggaaagaaatgcacaaattgttacctttttctcctgattctgttgttactcatggtgatttttctttagataatttgatctttgatgaaggtaaattgattggttgtattgatgttggtcgtgttggtattgctgatcgttatcaagatttagctattttatggaattgtttaggtgaattttctccttctttacagaaacgtttatttcagaaatatggtattgataatcctgatatgaacaagttacaatttcatttaatgttggacgagttcttttaagaattaattcatgaccaaaatcccttaacgtgagttttcgttccactgagcgtcagaccccgtagaaaagatcaaaggatcttcttgagatcctttttttctgcgcgtaatctgctgctatttaaattacgtacacggcggccgcgaataggaaatctcagttcagagttcggggtgttcactgcactagtcatgaacgggatttttaattcttaattcttaattcttaattatcaattatttaacgtcagttcgggtttgagaatgaaaaaaccctagggataaaggggggtttgcccctagccctttttataaaaaaagaattaaaagctaatcagaaatgaaaaaaataggcagtttaggagagaaaataattgcccagtggttaataaataaaggttattctgttatagaatcaaattggcattgtcgttggggtgaaattgaccttatagtaataaataaaagtttaaaagagattatatttgttgaagttaaaactcgcagtataaaaaattgggatgataatgggctatactctattaataacaaaaaacaagaaaaactctggttaacagctagtttatttttagaaaaaaatcaaatatttactgattggaactgtcgttttgatattgctttattaacttacaaaaaattaactaactttgggacagtattttctgttaacgataattgtttaagaccaaagtttaactatgaaggctatcaatttgaaattgttgattatttggaaaatgctttttaatctgatcttctgcacgtcaaatagtattctacaagacaattcagaatttagaatatattttttggcgttgcttaattatggtatgaaatttactgaaattatgccaaaaattgagacatcaaaatattatcattactgcaagaatgcccatttccccaaccccacctaaatgagaaatcatatacaaaactagtaaagcctatttttttgttacgagattatcccctaactttccattgaggaatcttcaattgtttatcaatgctttttctgctataattgcactcatggtaaggattgaaaacctaaattttaaggtcaattatcttaacttaatcgatagttgtctaagtataactaattgttatagttcatgaagatcaaaatatattgcattttccgcagtattgacagaaacagaagttagtaataaagcaacactatgggtatcagagaaatagttgataattcaagcgatttagaatttagaatcgttagattgatgctaatgccaatagaaatagaattaacttttattaaagaaatagctactattcctttagtctcagctcaaaattagtggactctctactaaattctgtttaggattgccttgttagttaataaattcgctattctcctgattatttttgcgaggagaaaagtcaagtatttacttttttaaaattatgtataaagatataattagtcaccgattaaaactttcattttaagatgatatgagtctaattgtgaacatggaaaagtcgggttttttaaattttacaacttttaggaaactgaaaatataaagtatgaaaaactttatttattcctgaagtcaataggacaaagttcgatgggcaaagggcaaaatgattttgcaagtaccttgacaaaccaaaaattactcgtcttaaaagactgagttttaaacccattgttctttgataaatgataaagaaacgataggataagttaataaaaaatgattttctgggaatcacaagaatttatgaagagatataaaaaaactttcctaagttaagaaaattaagaaaaactaatccatgagactacataaaaacaaggcaaaattttaagattgaactaacattaataattgatttctttaccataattactttgtcttttcataactaattgtgattaaaacagttgaaagtcagactctttttattagctttatatcgttaactaaacattatctgattgtgacaaatttaagcaaaatattttcaaaattatcaacacagaagcgaaaattttgtgaggatatcaatctagaatgacggtgaaaacctctgacacatgcagctcccggagacggtcacagcttgtctgtaagcggatgccgggagcagacaagcccgtcagggcgcgtcagcgggtgttggcgggtgtcggggcgcagccatgacccagtcacgtagcgatagcggagtgtatactggcttaactatgcggcatcagagcagattgtactgagagtgcaccatatgcggtgtgaaataccgcacagatgcgtaaggagaaaataccgcatcaggcgctcttccgcttcctcgctcactgactcgctgcgctcggtcgttcggctgcggcgagcggtatcagctcactcaaaggcggtaatacggttatccacagaatcaggggataacgcaggaaagaacatgtgagcaaaaggccagcaaaaggccaggaaccgtaaaaaggccgcgttgctggcgtttttccataggctccgcccccctgacgagcatcacaaaaatcgacgctcaagtcagaggtggcgaaacccgacaggactataaagataccaggcgtttccccctggaagctccctcgtgcgctctcctgttccgaccctgccgcttaccggatacctgtccgcctttctcccttcgggaagcgtggcgctttctcatagctcacgctgtaggtatctcagttcggtgtaggtcgttcgctccaagctgggctgtgtgcacgaaccccccgttcagcccgaccgctgcgccttatccggtaactatcgtcttgagtccaacccggtaagacacgacttatcgccactggcagcagccactggtaacaggattagcagagcgaggtatgtaggcggtgctacagagttcttgaagtggtggcctaactacggctacactagaaggacagtatttggtatctgcgctctgctgaagccagttaccttcggaaaaagagttggtagctcttgatccggcaaacaaaccaccgctggtagcggtggtttttttgtttgcaagcagcagattacgcgcagaaaaaaaggatctcaagaagatcctttgatcttttctaatgcatattttaccctcgacaaatccaagaccatgcaacatttagggtagaattatttttatactcgtaatgtgattgatgtttataacccatgatttttcccgatttttctgcattttctaaccttgttcatcagggaaattttattcctgtttatcgagaattggtagcggatttagaaacccctgtttctgcttggtataaagtttgtgcagaccagccctatagtttcttgttagagtcagtagaaggtggggaaaatttaggaagatatagctttttaggttgtgatcctgtttggatactagaagcaaggggaaatcagaccaaacaagttcatcgtgatggtaaaatcgaaactttttcaggaaatccctttaacatcctctctcaatgtttagaaactattaaacctgttaaattaccagagttgccccccggtattggcggactatttggttattggggttatgagttaatttcttggattgaaccacgagtcaacgtttatcctgcctctgcggaaagtttacccgatggtatttggatgcaggtagataatttattgatttttgatcaagtaaaaagaaaaatatgggcgatcgcatatgcagatttaagacaggagcatttaagcctagaagaaatctacaatcaggcttgtgacaaaatttctaaattagttttaaaactacaattacctttaccagtatccgcaaaaccccttgaatttaaccccccgccaaaaactcaaaaaaatcatcgcattcaatacaaaagcaacaccagcaaagaggcattttgtgccaatgtggaaaaagctaaagaatacattaaagcaggagatatttttcaagtagtcatttctcagaaattacaatctcattatcaaggtcatccttttgagttgtatcgctccttacgtttgattaacccttccccttatatggcttactataactttcatggatggcagttaatcggctcttctcccgaagtaatggttaaagcagaaaaaactaatgatggtaaaaccaaagccgtagtccgtcccattgcaggaacacgtccaaggggcagaaactatcaagaagaccaatttttagcccaagacttactcaatgatcccaaagaaagggcagaacacgtcatgttagtagatttgggcagaaatgacttaggcagggtctgtgtaaaaggaagcgtggaagtcgatgaattgatggttattgaacgttattcccacgtaatgcacatagtcagtaacgttgtgggagagttagcaggggattactgtgcatgggatttactaaaggcggctttccccgcaggtacggtaagtggagctcctaaaattcgagcaatggaaattattaatgaacttgaacccgaaaggaggggaccttattctggggtttatggttactatgattttgaaggacagttaaatactgctatcacaattagaacgatggttgtggaaaccctttctgggacggaaaatcacttggtatccgttcaagctggagcaggcttagtcgctgactcagatccagacaaggagtatcaagaaactttgaataaagctagaggtttgctagaggcgattagtagcttaagctaagtgaaaattcgtaataaaaaagagcaaatttttgtgactttaaacctgacacctgaaatttatttttgaactccgaacccaaataatgattcaggttgcttaaactcagagaatcattaataattgattcttgttaactcaattgtcatttttaacatgggtgttgaactccgaagctatgtctatctcgatcgattacaacctcaacacgcttcctatataggtacggttgctctaggatttttacctttacccggtgatgcttctttatggattgaaatatcccccggaattgaaataaatcgaattactgatgtggctttgaagtctgctgg

SEQ ID NO: 89 - DNA, 6005 bp, Cyanobacterium sp. ABICyano1
tcgacttctgcagcgagcgctcgttccgcaaagcggtacggagttagttaggggctaatgggcattctcccgtacaggaaagagttagaagttattaattatcaacaattctcctttgcctagtgcatcgttacctttttaattaaaacataaggaaaactaataatcgtaataatttaacctcaaagtgtaaagaaatgtgaaattctgacttttataacgttaaagagggaaaaattagcagtttaaaatacctagagaatagtctggggtaagcatagagaattagattagttaagttaatcaaattcagaaaaaataataatcgtaaatagttaatctgggtgtatagaaaatgatccccttcatgataagatttaaactcgaaaagcaaaagccaaaaaactaacttccattaaaagaagttgttacatataacgctataaagaaaatttatatatttggaggataccaaccatggtaagatcaagtaacgacgtaacccagcaaggtagtagacctaaaacaaagttgggaggctcaagtatgggtatcattcgcacttgtaggttagggcccgatcaagtgaaatctatgcgagctgctttagatctttttggtagagaatttggtgatgttgcaacttatagtcaacatcaaccagattccgactatttgggaaatcttttacgttctaaaacattcattgcattagcagcatttgatcaggaagctgttgtcggtgcattagccgcttatgttttacccaagtttgaacaacctcgttctgagatctatatctacgatttagcggtatctggcgagcatcgtcgccaagggatagcaacagcgttaatcaatttgttaaagcatgaagctaatgctcttggtgcctatgtgatttacgttcaagcggactatggagatgatcctgccgtagccttgtataccaaacttggaattagagaagaagttatgcactttgatattgatccttctactgctacttaacaattcgttcaagccgagatttaaattacgtacacggcggccgcgaataggaaatctcagttcagagttcggggtgttcactgcactagtcatgaacgggatttttaattcttaattcttaattcttaattatcaattatttaacgtcagttcgggtttgagaatgaaaaaaccctagggataaaggggggtttgcccctagccctttttataaaaaaagaattaaaagctaatcagaaatgaaaaaaataggcagtttaggagagaaaataattgcccagtggttaataaataaaggttattctgttatagaatcaaattggcattgtcgttggggtgaaattgaccttatagtaataaataaaagtttaaaagagattatatttgttgaagttaaaactcgcagtataaaaaattgggatgataatgggctatactctattaataacaaaaaacaagaaaaactctggttaacagctagtttatttttagaaaaaaatcaaatatttactgattggaactgtcgttttgatattgctttattaacttacaaaaaattaactaactttgggacagtattttctgttaacgataattgtttaagaccaaagtttaactatgaaggctatcaatttgaaattgttgattatttggaaaatgctttttaatctgatcttctgcacgtcaaatagtattctacaagacaattcagaatttagaatatattttttggcgttgcttaattatggtatgaaatttactgaaattatgccaaaaattgagacatcaaaatattatcattactgcaagaatgcccatttccccaaccccacctaaatgagaaatcatatacaaaactagtaaagcctatttttttgttacgagattatcccctaactttccattgaggaatcttcaattgtttatcaatgctttttctgctataattgcactcatggtaaggattgaaaacctaaattttaaggtcaattatcttaacttaatcgatagttgtctaagtataactaattgttatagttcatgaagatcaaaatatattgcattttccgcagtattgacagaaacagaagttagtaataaagcaacactatgggtatcagagaaatagttgataattcaagcgatttagaatttagaatcgttagattgatgctaatgccaatagaaatagaattaacttttattaaagaaatagctactattcctttagtctcagctcaaaattagtggactctctactaaattctgtttaggattgccttgttagttaataaattcgctattctcctgattatttttgcgaggagaaaagtcaagtatttacttttttaaaattatgtataaagatataattagtcaccgattaaaactttcattttaagatgatatgagtctaattgtgaacatggaaaagtcgggttttttaaattttacaacttttaggaaactgaaaatataaagtatgaaaaactttatttattcctgaagtcaataggacaaagttcgatgggcaaagggcaaaatgattttgcaagtaccttgacaaaccaaaaattactcgtcttaaaagactgagttttaaacccattgttctttgataaatgataaagaaacgataggataagttaataaaaaatgattttctgggaatcacaagaatttatgaagagatataaaaaaactttcctaagttaagaaaattaagaaaaactaatccatgagactacataaaaacaaggcaaaattttaagattgaactaacattaataattgatttctttaccataattactttgtcttttcataactaattgtgattaaaacagttgaaagtcagactctttttattagctttatatcgttaactaaacattatctgattgtgacaaatttaagcaaaatattttcaaaattatcaacacagaagcgaaaattttgtgaggatatcaatctagaatgacggtgaaaacctctgacacatgcagctcccggagacggtcacagcttgtctgtaagcggatgccgggagcagacaagcccgtcagggcgcgtcagcgggtgttggcgggtgtcggggcgcagccatgacccagtcacgtagcgatagcggagtgtatactggcttaactatgcggcatcagagcagattgtactgagagtgcaccatatgcggtgtgaaataccgcacagatgcgtaaggagaaaataccgcatcaggcgctcttccgcttcctcgctcactgactcgctgcgctcggtcgttcggctgcggcgagcggtatcagctcactcaaaggcggtaatacggttatccacagaatcaggggataacgcaggaaagaacatgtgagcaaaaggccagcaaaaggccaggaaccgtaaaaaggccgcgttgctggcgtttttccataggctccgcccccctgacgagcatcacaaaaatcgacgctcaagtcagaggtggcgaaacccgacaggactataaagataccaggcgtttccccctggaagctccctcgtgcgctctcctgttccgaccctgccgcttaccggatacctgtccgcctttctcccttcgggaagcgtggcgctttctcatagctcacgctgtaggtatctcagttcggtgtaggtcgttcgctccaagctgggctgtgtgcacgaaccccccgttcagcccgaccgctgcgccttatccggtaactatcgtcttgagtccaacccggtaagacacgacttatcgccactggcagcagccactggtaacaggattagcagagcgaggtatgtaggcggtgctacagagttcttgaagtggtggcctaactacggctacactagaaggacagtatttggtatctgcgctctgctgaagccagttaccttcggaaaaagagttggtagctcttgatccggcaaacaaaccaccgctggtagcggtggtttttttgtttgcaagcagcagattacgcgcagaaaaaaaggatctcaagaagatcctttgatcttttctaatgcatattttaccctcgacaaatccaagaccatgcaacatttagggtagaattatttttatactcgtaatgtgattgatgtttataacccatgatttttcccgatttttctgcattttctaaccttgttcatcagggaaattttattcctgtttatcgagaattggtagcggatttagaaacccctgtttctgcttggtataaagtttgtgcagaccagccctatagtttcttgttagagtcagtagaaggtggggaaaatttaggaagatatagctttttaggttgtgatcctgtttggatactagaagcaaggggaaatcagaccaaacaagttcatcgtgatggtaaaatcgaaactttttcaggaaatccctttaacatcctctctcaatgtttagaaactattaaacctgttaaattaccagagttgccccccggtattggcggactatttggttattggggttatgagttaatttcttggattgaaccacgagtcaacgtttatcctgcctctgcggaaagtttacccgatggtatttggatgcaggtagataatttattgatttttgatcaagtaaaaagaaaaatatgggcgatcgcatatgcagatttaagacaggagcatttaagcctagaagaaatctacaatcaggcttgtgacaaaatttctaaattagttttaaaactacaattacctttaccagtatccgcaaaaccccttgaatttaaccccccgccaaaaactcaaaaaaatcatcgcattcaatacaaaagcaacaccagcaaagaggcattttgtgccaatgtggaaaaagctaaagaatacattaaagcaggagatatttttcaagtagtcatttctcagaaattacaatctcattatcaaggtcatccttttgagttgtatcgctccttacgtttgattaacccttccccttatatggcttactataactttcatggatggcagttaatcggctcttctcccgaagtaatggttaaagcagaaaaaactaatgatggtaaaaccaaagccgtagtccgtcccattgcaggaacacgtccaaggggcagaaactatcaagaagaccaatttttagcccaagacttactcaatgatcccaaagaaagggcagaacacgtcatgttagtagatttgggcagaaatgacttaggcagggtctgtgtaaaaggaagcgtggaagtcgatgaattgatggttattgaacgttattcccacgtaatgcacatagtcagtaacgttgtgggagagttagcaggggattactgtgcatgggatttactaaaggcggctttccccgcaggtacggtaagtggagctcctaaaattcgagcaatggaaattattaatgaacttgaacccgaaaggaggggaccttattctggggtttatggttactatgattttgaaggacagttaaatactgctatcacaattagaacgatggttgtggaaaccctttctgggacggaaaatcacttggtatccgttcaagctggagcaggcttagtcgctgactcagatccagacaaggagtatcaagaaactttgaataaagctagaggtttgctagaggcgattagtagcttaagctaagtgaaaattcgtaataaaaaagagcaaatttttgtgactttaaacctgacacctgaaatttatttttgaactccgaacccaaataatgattcaggttgcttaaactcagagaatcattaataattgattcttgttaactcaattgtcatttttaacatgggtgttgaactccgaagctatgtctatctcgatcgattacaacctcaacacgcttcctatataggtacggttgctctaggatttttacctttacccggtgatgcttctttatggattgaaatatcccccggaattgaaataaatcgaattactgatgtggctttgaagtctgctgg

SEQ ID NO: 90 - DNA, 5870 bp, Cyanobacterium sp. ABICyano1
tcgacttctgcagtgagaaaaagtgtaaacaaatattaagaaaaagatcagaaaaatttaacaacacgtaataaaaaaatgcgtcactacgggttataaatttacatgaaaggttaaaacacttttctgagacgattttgataaaaaagttgtcaaaaaattaagtttctttacaaatgcttaacaaaaacttggttttaagcacaaaataagagagactaatttgcagaagttttacaaggaaatcttgaagaaaaagatctaagtaaaacgactctgtttaaccaaaatttaacaaatttaacaaaacaaactaaatctattaggagattaactaaaaccatggtaagatcaagtaacgacgtaacccagcaaggtagtagacctaaaacaaagttgggaggctcaagtatgggtatcattcgcacttgtaggttagggcccgatcaagtgaaatctatgcgagctgctttagatctttttggtagagaatttggtgatgttgcaacttatagtcaacatcaaccagattccgactatttgggaaatcttttacgttctaaaacattcattgcattagcagcatttgatcaggaagctgttgtcggtgcattagccgcttatgttttacccaagtttgaacaacctcgttctgagatctatatctacgatttagcggtatctggcgagcatcgtcgccaagggatagcaacagcgttaatcaatttgttaaagcatgaagctaatgctcttggtgcctatgtgatttacgttcaagcggactatggagatgatcctgccgtagccttgtataccaaacttggaattagagaagaagttatgcactttgatattgatccttctactgctacttaacaattcgttcaagccgagatttaaattacgtacacggcggccgcgaataggaaatctcagttcagagttcggggtgttcactgcactagtcatgaacgggatttttaattcttaattcttaattcttaattatcaattatttaacgtcagttcgggtttgagaatgaaaaaaccctagggataaaggggggtttgcccctagccctttttataaaaaaagaattaaaagctaatcagaaatgaaaaaaataggcagtttaggagagaaaataattgcccagtggttaataaataaaggttattctgttatagaatcaaattggcattgtcgttggggtgaaattgaccttatagtaataaataaaagtttaaaagagattatatttgttgaagttaaaactcgcagtataaaaaattgggatgataatgggctatactctattaataacaaaaaacaagaaaaactctggttaacagctagtttatttttagaaaaaaatcaaatatttactgattggaactgtcgttttgatattgctttattaacttacaaaaaattaactaactttgggacagtattttctgttaacgataattgtttaagaccaaagtttaactatgaaggctatcaatttgaaattgttgattatttggaaaatgctttttaatctgatcttctgcacgtcaaatagtattctacaagacaattcagaatttagaatatattttttggcgttgcttaattatggtatgaaatttactgaaattatgccaaaaattgagacatcaaaatattatcattactgcaagaatgcccatttccccaaccccacctaaatgagaaatcatatacaaaactagtaaagcctatttttttgttacgagattatcccctaactttccattgaggaatcttcaattgtttatcaatgctttttctgctataattgcactcatggtaaggattgaaaacctaaattttaaggtcaattatcttaacttaatcgatagttgtctaagtataactaattgttatagttcatgaagatcaaaatatattgcattttccgcagtattgacagaaacagaagttagtaataaagcaacactatgggtatcagagaaatagttgataattcaagcgatttagaatttagaatcgttagattgatgctaatgccaatagaaatagaattaacttttattaaagaaatagctactattcctttagtctcagctcaaaattagtggactctctactaaattctgtttaggattgccttgttagttaataaattcgctattctcctgattatttttgcgaggagaaaagtcaagtatttacttttttaaaattatgtataaagatataattagtcaccgattaaaactttcattttaagatgatatgagtctaattgtgaacatggaaaagtcgggttttttaaattttacaacttttaggaaactgaaaatataaagtatgaaaaactttatttattcctgaagtcaataggacaaagttcgatgggcaaagggcaaaatgattttgcaagtaccttgacaaaccaaaaattactcgtcttaaaagactgagttttaaacccattgttctttgataaatgataaagaaacgataggataagttaataaaaaatgattttctgggaatcacaagaatttatgaagagatataaaaaaactttcctaagttaagaaaattaagaaaaactaatccatgagactacataaaaacaaggcaaaattttaagattgaactaacattaataattgatttctttaccataattactttgtcttttcataactaattgtgattaaaacagttgaaagtcagactctttttattagctttatatcgttaactaaacattatctgattgtgacaaatttaagcaaaatattttcaaaattatcaacacagaagcgaaaattttgtgaggatatcaatctagaatgacggtgaaaacctctgacacatgcagctcccggagacggtcacagcttgtctgtaagcggatgccgggagcagacaagcccgtcagggcgcgtcagcgggtgttggcgggtgtcggggcgcagccatgacccagtcacgtagcgatagcggagtgtatactggcttaactatgcggcatcagagcagattgtactgagagtgcaccatatgcggtgtgaaataccgcacagatgcgtaaggagaaaataccgcatcaggcgctcttccgcttcctcgctcactgactcgctgcgctcggtcgttcggctgcggcgagcggtatcagctcactcaaaggcggtaatacggttatccacagaatcaggggataacgcaggaaagaacatgtgagcaaaaggccagcaaaaggccaggaaccgtaaaaaggccgcgttgctggcgtttttccataggctccgcccccctgacgagcatcacaaaaatcgacgctcaagtcagaggtggcgaaacccgacaggactataaagataccaggcgtttccccctggaagctccctcgtgcgctctcctgttccgaccctgccgcttaccggatacctgtccgcctttctcccttcgggaagcgtggcgctttctcatagctcacgctgtaggtatctcagttcggtgtaggtcgttcgctccaagctgggctgtgtgcacgaaccccccgttcagcccgaccgctgcgccttatccggtaactatcgtcttgagtccaacccggtaagacacgacttatcgccactggcagcagccactggtaacaggattagcagagcgaggtatgtaggcggtgctacagagttcttgaagtggtggcctaactacggctacactagaaggacagtatttggtatctgcgctctgctgaagccagttaccttcggaaaaagagttggtagctcttgatccggcaaacaaaccaccgctggtagcggtggtttttttgtttgcaagcagcagattacgcgcagaaaaaaaggatctcaagaagatcctttgatcttttctaatgcatattttaccctcgacaaatccaagaccatgcaacatttagggtagaattatttttatactcgtaatgtgattgatgtttataacccatgatttttcccgatttttctgcattttctaaccttgttcatcagggaaattttattcctgtttatcgagaattggtagcggatttagaaacccctgtttctgcttggtataaagtttgtgcagaccagccctatagtttcttgttagagtcagtagaaggtggggaaaatttaggaagatatagctttttaggttgtgatcctgtttggatactagaagcaaggggaaatcagaccaaacaagttcatcgtgatggtaaaatcgaaactttttcaggaaatccctttaacatcctctctcaatgtttagaaactattaaacctgttaaattaccagagttgccccccggtattggcggactatttggttattggggttatgagttaatttcttggattgaaccacgagtcaacgtttatcctgcctctgcggaaagtttacccgatggtatttggatgcaggtagataatttattgatttttgatcaagtaaaaagaaaaatatgggcgatcgcatatgcagatttaagacaggagcatttaagcctagaagaaatctacaatcaggcttgtgacaaaatttctaaattagttttaaaactacaattacctttaccagtatccgcaaaaccccttgaatttaaccccccgccaaaaactcaaaaaaatcatcgcattcaatacaaaagcaacaccagcaaagaggcattttgtgccaatgtggaaaaagctaaagaatacattaaagcaggagatatttttcaagtagtcatttctcagaaattacaatctcattatcaaggtcatccttttgagttgtatcgctccttacgtttgattaacccttccccttatatggcttactataactttcatggatggcagttaatcggctcttctcccgaagtaatggttaaagcagaaaaaactaatgatggtaaaaccaaagccgtagtccgtcccattgcaggaacacgtccaaggggcagaaactatcaagaagaccaatttttagcccaagacttactcaatgatcccaaagaaagggcagaacacgtcatgttagtagatttgggcagaaatgacttaggcagggtctgtgtaaaaggaagcgtggaagtcgatgaattgatggttattgaacgttattcccacgtaatgcacatagtcagtaacgttgtgggagagttagcaggggattactgtgcatgggatttactaaaggcggctttccccgcaggtacggtaagtggagctcctaaaattcgagcaatggaaattattaatgaacttgaacccgaaaggaggggaccttattctggggtttatggttactatgattttgaaggacagttaaatactgctatcacaattagaacgatggttgtggaaaccctttctgggacggaaaatcacttggtatccgttcaagctggagcaggcttagtcgctgactcagatccagacaaggagtatcaagaaactttgaataaagctagaggtttgctagaggcgattagtagcttaagctaagtgaaaattcgtaataaaaaagagcaaatttttgtgactttaaacctgacacctgaaatttatttttgaactccgaacccaaataatgattcaggttgcttaaactcagagaatcattaataattgattcttgttaactcaattgtcatttttaacatgggtgttgaactccgaagctatgtctatctcgatcgattacaacctcaacacgcttcctatataggtacggttgctctaggatttttacctttacccggtgatgcttctttatggattgaaatatcccccggaattgaaataaatcgaattactgatgtggctttgaagtctgctgg

SEQ ID NO: 91 - DNA, 4187 bp, Cyanobacterium sp. ABICyano1
tcgacttctgcaggaagttcctattctctagaaagtataggaacttctgagaaaaagtgtaaacaaatattaagaaaaagatcagaaaaatttaacaacacgtaataaaaaaatgcgtcactacgggttataaatttacatgaaaggttaaaacacttttctgagacgattttgataaaaaagttgtcaaaaaattaagtttctttacaaatgcttaacaaaaacttggttttaagcacaaaataagagagactaatttgcagaagttttacaaggaaatcttgaagaaaaagatctaagtaaaacgactctgtttaaccaaaatttaacaaatttaacaaaacaaactaaatctattaggagattaactaaaaccatggtaagatcaagtaacgacgtaacccagcaaggtagtagacctaaaacaaagttgggaggctcaagtatgggtatcattcgcacttgtaggttagggcccgatcaagtgaaatctatgcgagctgctttagatctttttggtagagaatttggtgatgttgcaacttatagtcaacatcaaccagattccgactatttgggaaatcttttacgttctaaaacattcattgcattagcagcatttgatcaggaagctgttgtcggtgcattagccgcttatgttttacccaagtttgaacaacctcgttctgagatctatatctacgatttagcggtatctggcgagcatcgtcgccaagggatagcaacagcgttaatcaatttgttaaagcatgaagctaatgctcttggtgcctatgtgatttacgttcaagcggactatggagatgatcctgccgtagccttgtataccaaacttggaattagagaagaagttatgcactttgatattgatccttctactgctacttaacaattcgttcaagccgagtcacactggctcaccttcggtgggcctttctgcgtttatatactagagagagaatataaaaagccagattattaatccggcttttttattatttgaagttcctattctctagaaagtataggaacttcatttaaattacgtacacggcggccggaataggaaatctcagttcagagttcggggtgttcactgcactagtcatgaacgggatttttaattcttaattcttaattcttaattatcaattatttaacgtcagttcgggtttgagaatgaaaaaaccctagggataaaggggggtttgcccctagccctttttataaaaaaagaattaaaagctaatcagaaatgaaaaaaataggcagtttaggagagaaaataattgcccagtggttaataaataaaggttattctgttatagaatcaaattggcattgtcgttggggtgaaattgaccttatagtaataaataaaagtttaaaagagattatatttgttgaagttaaaactcgcagtataaaaaattgggatgataatgggctatactctattaataacaaaaaacaagaaaaactctggttaacagctagtttatttttagaaaaaaatcaaatatttactgattggaactgtcgttttgatattgctttattaacttacaaaaaattaactaactttgggacagtattttctgttaacgataattgtttaagaccaaagtttaactatgaaggctatcaatttgaaattgttgattatttggaaaatgctttttaatctgatcttctgcacgtcaaatagtattctacaagacaattcagaatttagaatatattttttggcgttgcttaattatggtatgaaatttactgaaattatgccaaaaattgagacatcaaaatattatcattactgcaagaatgcccatttccccaaccccacctaaatgagaaatcatatacaaaactagtaaagcctatttttttgttacgagattatcccctaactttccattgaggaatcttcaattgtttatcaatgctttttctgctataattgcactcatggtaaggattgaaaacctaaattttaaggtcaattatcttaacttaatcgatagttgtctaagtataactaattgttatagttcatgaagatcaaaatatattgcattttccgcgatatcaatctagaatgacggtgaaaacctctgacacatgcagctcccggagacggtcacagcttgtctgtaagcggatgccgggagcagacaagcccgtcagggcgcgtcagcgggtgttggcgggtgtcggggcgcagccatgacccagtcacgtagcgatagcggagtgtatactggcttaactatgcggcatcagagcagattgtactgagagtgcaccatatgcggtgtgaaataccgcacagatgcgtaaggagaaaataccgcatcaggcgctcttccgcttcctcgctcactgactcgctgcgctcggtcgttcggctgcggcgagcggtatcagctcactcaaaggcggtaatacggttatccacagaatcaggggataacgcaggaaagaacatgtgagcaaaaggccagcaaaaggccaggaaccgtaaaaaggccgcgttgctggcgtttttccataggctccgcccccctgacgagcatcacaaaaatcgacgctcaagtcagaggtggcgaaacccgacaggactataaagataccaggcgtttccccctggaagctccctcgtgcgctctcctgttccgaccctgccgcttaccggatacctgtccgcctttctcccttcgggaagcgtggcgctttctcatagctcacgctgtaggtatctcagttcggtgtaggtcgttcgctccaagctgggctgtgtgcacgaaccccccgttcagcccgaccgctgcgccttatccggtaactatcgtcttgagtccaacccggtaagacacgacttatcgccactggcagcagccactggtaacaggattagcagagcgaggtatgtaggcggtgctacagagttcttgaagtggtggcctaactacggctacactagaaggacagtatttggtatctgcgctctgctgaagccagttaccttcggaaaaagagttggtagctcttgatccggcaaacaaaccaccgctggtagcggtggtttttttgtttgcaagcagcagattacgcgcagaaaaaaaggatctcaagaagatcctttgatcttttctaatgcataactttcatggatggcagttaatcggctcttctcccgaagtaatggttaaagcagaaaaaactaatgatggtaaaaccaaagccgtagtccgtcccattgcaggaacacgtccaaggggcagaaactatcaagaagaccaatttttagcccaagacttactcaatgatcccaaagaaagggcagaacacgtcatgttagtagatttgggcagaaatgacttaggcagggtctgtgtaaaaggaagcgtggaagtcgatgaattgatggttattgaacgttattcccacgtaatgcacatagtcagtaacgttgtgggagagttagcaggggattactgtgcatgggatttactaaaggcggctttccccgcaggtacggtaagtggagctcctaaaattcgagcaatggaaattattaatgaacttgaacccgaaaggaggggaccttattctggggtttatggttactatgattttgaaggacagttaaatactgctatcacaattagaacgatggttgtggaaaccctttctgggacggaaaatcacttggtatccgttcaagctggagcaggcttagtcgctgactcagatccagacaaggagtatcaagaaactttgaataaagctagaggtttgctagaggcgattagtagcttaagctaagtgaaaattcgtaataaaaaagagcaaatttttgtgactttaaacctgacacctgaaatttatttttgaactccgaacccaaataatgattcaggttgcttaaactcagagaatcattaataattgattcttgttaactcaattgtcatttttaacatgggtgttgaactccgaagctatgtctatctcgatcgattacaacctcaacacgcttcctatataggtacggttgctctaggatttttacctttacccggtgatgcttctttatggattgaaatatcccccggaattgaaataaatcgaattactgatgtggctttgaagtctgctgg

SEQ ID NO: 92 - DNA, 6032 bp, Cyanobacterium sp. ABICyano1
tcgacttctgcaggaagttcctattctctagaaagtataggaacttctgagaaaaagtgtaaacaaatattaagaaaaagatcagaaaaatttaacaacacgtaataaaaaaatgcgtcactacgggttataaatttacatgaaaggttaaaacacttttctgagacgattttgataaaaaagttgtcaaaaaattaagtttctttacaaatgcttaacaaaaacttggttttaagcacaaaataagagagactaatttgcagaagttttacaaggaaatcttgaagaaaaagatctaagtaaaacgactctgtttaaccaaaatttaacaaatttaacaaaacaaactaaatctattaggagattaactaaaaccatggtaagatcaagtaacgacgtaacccagcaaggtagtagacctaaaacaaagttgggaggctcaagtatgggtatcattcgcacttgtaggttagggcccgatcaagtgaaatctatgcgagctgctttagatctttttggtagagaatttggtgatgttgcaacttatagtcaacatcaaccagattccgactatttgggaaatcttttacgttctaaaacattcattgcattagcagcatttgatcaggaagctgttgtcggtgcattagccgcttatgttttacccaagtttgaacaacctcgttctgagatctatatctacgatttagcggtatctggcgagcatcgtcgccaagggatagcaacagcgttaatcaatttgttaaagcatgaagctaatgctcttggtgcctatgtgatttacgttcaagcggactatggagatgatcctgccgtagccttgtataccaaacttggaattagagaagaagttatgcactttgatattgatccttctactgctacttaacaattcgttcaagccgagtcacactggctcaccttcggtgggcctttctgcgtttatatactagagagagaatataaaaagccagattattaatccggcttttttattatttgaagttcctattctctagaaagtataggaacttcatttaaattacgtacacggcggccgcgaataggaaatctcagttcagagttcggggtgttcactgcactagtcatgaacgggatttttaattcttaattcttaattcttaattatcaattatttaacgtcagttcgggtttgagaatgaaaaaaccctagggataaaggggggtttgcccctagccctttttataaaaaaagaattaaaagctaatcagaaatgaaaaaaataggcagtttaggagagaaaataattgcccagtggttaataaataaaggttattctgttatagaatcaaattggcattgtcgttggggtgaaattgaccttatagtaataaataaaagtttaaaagagattatatttgttgaagttaaaactcgcagtataaaaaattgggatgataatgggctatactctattaataacaaaaaacaagaaaaactctggttaacagctagtttatttttagaaaaaaatcaaatatttactgattggaactgtcgttttgatattgctttattaacttacaaaaaattaactaactttgggacagtattttctgttaacgataattgtttaagaccaaagtttaactatgaaggctatcaatttgaaattgttgattatttggaaaatgctttttaatctgatcttctgcacgtcaaatagtattctacaagacaattcagaatttagaatatattttttggcgttgcttaattatggtatgaaatttactgaaattatgccaaaaattgagacatcaaaatattatcattactgcaagaatgcccatttccccaaccccacctaaatgagaaatcatatacaaaactagtaaagcctatttttttgttacgagattatcccctaactttccattgaggaatcttcaattgtttatcaatgctttttctgctataattgcactcatggtaaggattgaaaacctaaattttaaggtcaattatcttaacttaatcgatagttgtctaagtataactaattgttatagttcatgaagatcaaaatatattgcattttccgcagtattgacagaaacagaagttagtaataaagcaacactatgggtatcagagaaatagttgataattcaagcgatttagaatttagaatcgttagattgatgctaatgccaatagaaatagaattaacttttattaaagaaatagctactattcctttagtctcagctcaaaattagtggactctctactaaattctgtttaggattgccttgttagttaataaattcgctattctcctgattatttttgcgaggagaaaagtcaagtatttacttttttaaaattatgtataaagatataattagtcaccgattaaaactttcattttaagatgatatgagtctaattgtgaacatggaaaagtcgggttttttaaattttacaacttttaggaaactgaaaatataaagtatgaaaaactttatttattcctgaagtcaataggacaaagttcgatgggcaaagggcaaaatgattttgcaagtaccttgacaaaccaaaaattactcgtcttaaaagactgagttttaaacccattgttctttgataaatgataaagaaacgataggataagttaataaaaaatgattttctgggaatcacaagaatttatgaagagatataaaaaaactttcctaagttaagaaaattaagaaaaactaatccatgagactacataaaaacaaggcaaaattttaagattgaactaacattaataattgatttctttaccataattactttgtcttttcataactaattgtgattaaaacagttgaaagtcagactctttttattagctttatatcgttaactaaacattatctgattgtgacaaatttaagcaaaatattttcaaaattatcaacacagaagcgaaaattttgtgaggatatcaatctagaatgacggtgaaaacctctgacacatgcagctcccggagacggtcacagcttgtctgtaagcggatgccgggagcagacaagcccgtcagggcgcgtcagcgggtgttggcgggtgtcggggcgcagccatgacccagtcacgtagcgatagcggagtgtatactggcttaactatgcggcatcagagcagattgtactgagagtgcaccatatgcggtgtgaaataccgcacagatgcgtaaggagaaaataccgcatcaggcgctcttccgcttcctcgctcactgactcgctgcgctcggtcgttcggctgcggcgagcggtatcagctcactcaaaggcggtaatacggttatccacagaatcaggggataacgcaggaaagaacatgtgagcaaaaggccagcaaaaggccaggaaccgtaaaaaggccgcgttgctggcgtttttccataggctccgcccccctgacgagcatcacaaaaatcgacgctcaagtcagaggtggcgaaacccgacaggactataaagataccaggcgtttccccctggaagctccctcgtgcgctctcctgttccgaccctgccgcttaccggatacctgtccgcctttctcccttcgggaagcgtggcgctttctcatagctcacgctgtaggtatctcagttcggtgtaggtcgttcgctccaagctgggctgtgtgcacgaaccccccgttcagcccgaccgctgcgccttatccggtaactatcgtcttgagtccaacccggtaagacacgacttatcgccactggcagcagccactggtaacaggattagcagagcgaggtatgtaggcggtgctacagagttcttgaagtggtggcctaactacggctacactagaaggacagtatttggtatctgcgctctgctgaagccagttaccttcggaaaaagagttggtagctcttgatccggcaaacaaaccaccgctggtagcggtggtttttttgtttgcaagcagcagattacgcgcagaaaaaaaggatctcaagaagatcctttgatcttttctaatgcatattttaccctcgacaaatccaagaccatgcaacatttagggtagaattatttttatactcgtaatgtgattgatgtttataacccatgatttttcccgatttttctgcattttctaaccttgttcatcagggaaattttattcctgtttatcgagaattggtagcggatttagaaacccctgtttctgcttggtataaagtttgtgcagaccagccctatagtttcttgttagagtcagtagaaggtggggaaaatttaggaagatatagctttttaggttgtgatcctgtttggatactagaagcaaggggaaatcagaccaaacaagttcatcgtgatggtaaaatcgaaactttttcaggaaatccctttaacatcctctctcaatgtttagaaactattaaacctgttaaattaccagagttgccccccggtattggcggactatttggttattggggttatgagttaatttcttggattgaaccacgagtcaacgtttatcctgcctctgcggaaagtttacccgatggtatttggatgcaggtagataatttattgatttttgatcaagtaaaaagaaaaatatgggcgatcgcatatgcagatttaagacaggagcatttaagcctagaagaaatctacaatcaggcttgtgacaaaatttctaaattagttttaaaactacaattacctttaccagtatccgcaaaaccccttgaatttaaccccccgccaaaaactcaaaaaaatcatcgcattcaatacaaaagcaacaccagcaaagaggcattttgtgccaatgtggaaaaagctaaagaatacattaaagcaggagatatttttcaagtagtcatttctcagaaattacaatctcattatcaaggtcatccttttgagttgtatcgctccttacgtttgattaacccttccccttatatggcttactataactttcatggatggcagttaatcggctcttctcccgaagtaatggttaaagcagaaaaaactaatgatggtaaaaccaaagccgtagtccgtcccattgcaggaacacgtccaaggggcagaaactatcaagaagaccaatttttagcccaagacttactcaatgatcccaaagaaagggcagaacacgtcatgttagtagatttgggcagaaatgacttaggcagggtctgtgtaaaaggaagcgtggaagtcgatgaattgatggttattgaacgttattcccacgtaatgcacatagtcagtaacgttgtgggagagttagcaggggattactgtgcatgggatttactaaaggcggctttccccgcaggtacggtaagtggagctcctaaaattcgagcaatggaaattattaatgaacttgaacccgaaaggaggggaccttattctggggtttatggttactatgattttgaaggacagttaaatactgctatcacaattagaacgatggttgtggaaaccctttctgggacggaaaatcacttggtatccgttcaagctggagcaggcttagtcgctgactcagatccagacaaggagtatcaagaaactttgaataaagctagaggtttgctagaggcgattagtagcttaagctaagtgaaaattcgtaataaaaaagagcaaatttttgtgactttaaacctgacacctgaaatttatttttgaactccgaacccaaataatgattcaggttgcttaaactcagagaatcattaataattgattcttgttaactcaattgtcatttttaacatgggtgttgaactccgaagctatgtctatctcgatcgattacaacctcaacacgcttcctatataggtacggttgctctaggatttttacctttacccggtgatgcttctttatggattgaaatatcccccggaattgaaataaatcgaattactgatgtggctttgaagtctgctgg

SEQ ID NO: 93 - DNA, 8367 bp, Cyanobacterium sp. ABICyano1
tcgacttctgcaggaagttcctattctctagaaagtataggaacttctgagaaaaagtgtaaacaaatattaagaaaaagatcagaaaaatttaacaacacgtaataaaaaaatgcgtcactacgggttataaatttacatgaaaggttaaaacacttttctgagacgattttgataaaaaagttgtcaaaaaattaagtttctttacaaatgcttaacaaaaacttggttttaagcacaaaataagagagactaatttgcagaagttttacaaggaaatcttgaagaaaaagatctaagtaaaacgactctgtttaaccaaaatttaacaaatttaacaaaacaaactaaatctattaggagattaactaaaaccatggtaagatcaagtaacgacgtaacccagcaaggtagtagacctaaaacaaagttgggaggctcaagtatgggtatcattcgcacttgtaggttagggcccgatcaagtgaaatctatgcgagctgctttagatctttttggtagagaatttggtgatgttgcaacttatagtcaacatcaaccagattccgactatttgggaaatcttttacgttctaaaacattcattgcattagcagcatttgatcaggaagctgttgtcggtgcattagccgcttatgttttacccaagtttgaacaacctcgttctgagatctatatctacgatttagcggtatctggcgagcatcgtcgccaagggatagcaacagcgttaatcaatttgttaaagcatgaagctaatgctcttggtgcctatgtgatttacgttcaagcggactatggagatgatcctgccgtagccttgtataccaaacttggaattagagaagaagttatgcactttgatattgatccttctactgctacttaacaattcgttcaagccgagtcacactggctcaccttcggtgggcctttctgcgtttatatactagagagagaatataaaaagccagattattaatccggcttttttattatttgaagttcctattctctagaaagtataggaacttcatttaaattacgtacacggcggccgcccgcagtattgacagaaacagaagttagtaataaagcaacactatgggtatcagagaaatagttgataattcaagcgatttagaatttagaatcgttagattgatgctaatgccaatagaaatagaattaacttttattaaagaaatagctactattcctttagtctcagctcaaaattagtggactctctactaaattctgtttaggattgccttgttagttaataaattcgctattctcctgattatttttgcgaggagaaaagtcaagtatttacttttttaaaattatgtataaagatataattagtcaccgattaaaactttcattttaagatgatatgagtctaattgtgaacatggaaaagtcgggttttttaaattttacaacttttaggaaactgaaaatataaagtatgaaaaactttatttattcctgaagtcaataggacaaagttcgatgggcaaagggcaaaatgattttgcaagtaccttgacaaaccaaaaattactcgtcttaaaagactgagttttaaacccattgttctttgataaatgataaagaaacgataggataagttaataaaaaatgattttctgggaatcacaagaatttatgaagagatataaaaaaactttcctaagttaagaaaattaagaaaaactaatccatgagactacataaaaacaaggcaaaattttaagattgaactaacattaataattgatttctttaccataattactttgtcttttcataactaattgtgattaaaacagttgaaagtcagactctttttattagctttatatcgttaactaaacattatctgattgtgacaaatttaagcaaaatattttcaaaattatcaacacagaagcgaaaattttgtgagggaattgaatgccaaaacaaataataattgcagaaaaaaatcatatagcggcagtatttgctgaagatcaaattcaagaattagtggttgctaccggaaaccaacaggtaggagatatttatttaggaacagtcgaaaatgttatttcgggtattgatgcggcttttgtcaatataggcgatgcggaaaagaatggttttatccatgttactgatttgggtcctttacgattaaaaagaagcgcaggggcaattactgaattattaactcctcatcaatccgtattggttcaagtaatgaaagaacctacaggaacaaaaggacctcgtttgacaggtaatattagtttaccggggcgttatttggtgttaatgccttatggaaagggagttagtctttctcgacgcatcaagaatgataatgagcgtaatcgccttagagcattagctattcttttgaaacctgcggggatgggtttgttggttcgcacagaagctgatggtaaaggagaagatgcgattattgaggatttggagtttctcaaaaaacagtgggaaaaaatccaacaggaagcgaatactttaaatcctcctgcgttgttgaatcgagatgatgatttcattcaacgggttttgcgagatatgtatagtgacgatgtcaatcgtattgtagttgattctgacgatgcagtaagaagggttaaaaaacagttaaataattggggaagtggtaaaaatcctcatggtttattaattgattctcatcaggatagccgttctattttagattatttccgagttaatagtgccattaaagaagcattgaaaccgagggttgatttaccttctgggggatatattatcattgaacccacagaagcattaacggtaattgatgttaactctggctcttttactcattcagcgacttcccgagaaacggttttatggactaatactgaagctgcgatcgaaattgctcgtcagttaaaattacgtaatattggtggggtgattgtggttgacttcattgatatggattctcgccgagataaattaaaattgttagagcattttaaccgagttttacaaagcgataaggctagacctcaaatcgcacagctatcagaattaggattagtggaactaactcgtaagcgtcagggtaaaaatatttatgaattatttagtcaaccctgtagtcattgtggtggtttaggcttagtgggtcatttccccgggcattatgatttagaaagtcttacttccaataattattatcaacctcctcaaattagcaaaacagagaagcctattctcgatgaaaaaattatttctcttgatgattttagtagcgataatgatgagttagatttagttaatcatcctagttatcaagaaagcaacaatggtaatagtcgtcgccgtcgtcgtcgtcgagaaaatggggtgaaagaagagcctattttagcgggaagtaatggtaatgggggagagactgaaagtaagcctgaaagaaaagagcgtagtttattatctcgttctttacgcagagatgaaagtcagtgggaaaaagtagtagtagaaatgactcctgcggagcaagatgtttatgcttttatgggggtttctcctttactccgtttagaacaagaatttaaagaccctaaatcggttttagtttatgtgcgtaatccagaggagcaggaaaatatagaaaatatagatactgccatggaaaaaaatcagcaagaggatatagaaatagctgatgatgaggacaaaaatgcgatcgaggtagctcccgccgccgaggttattttcccccaagggaaggaaacgatggtaaatgaattagaaattgatgtacaagtgggagaagtggatgagcaaatagaattagaggaagatgaccactttgaggaaagttccaaagaagtctttgatggtgataatagtgaaactgctgaagaaactattactgatgccattataaaagaggctttagagagcgatcgccccgttgtcagaacccgtcgtcgtcgcacttctcgtaattcttgattttagttaactaacctcagttcggtttaagaatatccgataaggttaggtgttaggtgtcaggttgcaggaacagcaggtggtaggggtgaataaatatatttaacgtcagttcggattaaggcaattttatcgttatttctaagttatttctaagaagctataaggttttttgactacgagttggtctgctttcgatatcaatctagaatgacggtgaaaacctctgacacatgcagctcccggagacggtcacagcttgtctgtaagcggatgccgggagcagacaagcccgtcagggcgcgtcagcgggtgttggcgggtgtcggggcgcagccatgacccagtcacgtagcgatagcggagtgtatactggcttaactatgcggcatcagagcagattgtactgagagtgcaccatatgcggtgtgaaataccgcacagatgcgtaaggagaaaataccgcatcaggcgctcttccgcttcctcgctcactgactcgctgcgctcggtcgttcggctgcggcgagcggtatcagctcactcaaaggcggtaatacggttatccacagaatcaggggataacgcaggaaagaacatgtgagcaaaaggccagcaaaaggccaggaaccgtaaaaaggccgcgttgctggcgtttttccataggctccgcccccctgacgagcatcacaaaaatcgacgctcaagtcagaggtggcgaaacccgacaggactataaagataccaggcgtttccccctggaagctccctcgtgcgctctcctgttccgaccctgccgcttaccggatacctgtccgcctttctcccttcgggaagcgtggcgctttctcatagctcacgctgtaggtatctcagttcggtgtaggtcgttcgctccaagctgggctgtgtgcacgaaccccccgttcagcccgaccgctgcgccttatccggtaactatcgtcttgagtccaacccggtaagacacgacttatcgccactggcagcagccactggtaacaggattagcagagcgaggtatgtaggcggtgctacagagttcttgaagtggtggcctaactacggctacactagaaggacagtatttggtatctgcgctctgctgaagccagttaccttcggaaaaagagttggtagctcttgatccggcaaacaaaccaccgctggtagcggtggtttttttgtttgcaagcagcagattacgcgcagaaaaaaaggatctcaagaagatcctttgatcttttctaatgcatcctttaaggattggtattgaggctttaaatcaagaatgggaattttcatgaatgactactaagaggatgattaatctaagagtttacactattttttcatcggaaaaaaccatcatcattcagaagattgagaaggaggatttggggtgtttgtagatggattattttgctgtgctaaaccttgtttaataaaacttagggcttcttgataactttgattttctggttgaagacttactaatttttccattaggggtagggcagaagctaaatctccaccagacagataaatttgaactagcttttctaaggcaaaaatgttatcaggctctctttgcaaaaccaatttataaccctgagcctctttttctaaaattgcttgagccgaatcaggttcttgttgttgaggttgattggcattactaggacttttcaacatttttacaacgccaaaaattgaaaaagagaaaaaagaaagcccagataaaattactaaaaccctacgaagaacttgtttaggagtggtttttttatttgtgttaaccattagttatagaaatattttaagcaagtgtcattaactattttaccctcgacaaatccaagaccatgcaacatttagggtagaattatttttatactcgtaatgtgattgatgtttataacccatgatttttcccgatttttctgcattttctaaccttgttcatcagggaaattttattcctgtttatcgagaattggtagcggatttagaaacccctgtttctgcttggtataaagtttgtgcagaccagccctatagtttcttgttagagtcagtagaaggtggggaaaatttaggaagatatagctttttaggttgtgatcctgtttggatactagaagcaaggggaaatcagaccaaacaagttcatcgtgatggtaaaatcgaaactttttcaggaaatccctttaacatcctctctcaatgtttagaaactattaaacctgttaaattaccagagttgccccccggtattggcggactatttggttattggggttatgagttaatttcttggattgaaccacgagtcaacgtttatcctgcctctgcggaaagtttacccgatggtatttggatgcaggtagataatttattgatttttgatcaagtaaaaagaaaaatatgggcgatcgcatatgcagatttaagacaggagcatttaagcctagaagaaatctacaatcaggcttgtgacaaaatttctaaattagttttaaaactacaattacctttaccagtatccgcaaaaccccttgaatttaaccccccgccaaaaactcaaaaaaatcatcgcattcaatacaaaagcaacaccagcaaagaggcattttgtgccaatgtggaaaaagctaaagaatacattaaagcaggagatatttttcaagtagtcatttctcagaaattacaatctcattatcaaggtcatccttttgagttgtatcgctccttacgtttgattaacccttccccttatatggcttactataactttcatggatggcagttaatcggctcttctcccgaagtaatggttaaagcagaaaaaactaatgatggtaaaaccaaagccgtagtccgtcccattgcaggaacacgtccaaggggcagaaactatcaagaagaccaatttttagcccaagacttactcaatgatcccaaagaaagggcagaacacgtcatgttagtagatttgggcagaaatgacttaggcagggtctgtgtaaaaggaagcgtggaagtcgatgaattgatggttattgaacgttattcccacgtaatgcacatagtcagtaacgttgtgggagagttagcaggggattactgtgcatgggatttactaaaggcggctttccccgcaggtacggtaagtggagctcctaaaattcgagcaatggaaattattaatgaacttgaacccgaaaggaggggaccttattctggggtttatggttactatgattttgaaggacagttaaatactgctatcacaattagaacgatggttgtggaaaccctttctgggacggaaaatcacttggtatccgttcaagctggagcaggcttagtcgctgactcagatccagacaaggagtatcaagaaactttgaataaagctagaggtttgctagaggcgattagtagcttaagctaagtgaaaattcgtaataaaaaagagcaaatttttgtgactttaaacctgacacctgaaatttatttttgaactccgaacccaaataatgattcaggttgcttaaactcagagaatcattaataattgattcttgttaactcaattgtcatttttaacatgggtgttgaactccgaagctatgtctatctcgatcgattacaacctcaacacgcttcctatataggtacggttgctctaggatttttacctttacccggtgatgcttctttatggattgaaatatcccccggaattgaaataaatcgaattactgatgtggctttgaagtctgctgtagtcagaccgggagttcaatttgtggaacgtctttatggtttattggagattcattctagtaatcaaggggaagtaaaaacggctggaatggcgattttagatgctttaggtgtgagtgaaaaagattctcttaaaccagaggtggtttctagccaaattattcgcaatattgacccttatcaagcccaaatcattaatcgtaatcgtcgaggacaaatgttgttagcaggagaaactctttatgtgttggaagttaaaccagccgcttatgcggcattggcggcaaacgaagcggagaaggcggcgttgattaatattttgacggttcaggcggtgggtagttttggacgactttatttaggaggtgctgaaagggatattaaagcgggggcggcggcggctttagatgcgatcgcaaatatcggtgggagagtaagtgtttcaaaaataaatgaataaaaaaactctttgtttatgggaattataaataatcctcatcctcagataagttaagg

SEQ ID NO: 94 - DNA, 7151 bp, Cyanobacterium sp. ABICyano1
tcgacttctgcaggaagttcctattctctagaaagtataggaacttctgagaaaaagtgtaaacaaatattaagaaaaagatcagaaaaatttaacaacacgtaataaaaaaatgcgtcactacgggttataaatttacatgaaaggttaaaacacttttctgagacgattttgataaaaaagttgtcaaaaaattaagtttctttacaaatgcttaacaaaaacttggttttaagcacaaaataagagagactaatttgcagaagttttacaaggaaatcttgaagaaaaagatctaagtaaaacgactctgtttaaccaaaatttaacaaatttaacaaaacaaactaaatctattaggagattaactaaaaccatggtaagatcaagtaacgacgtaacccagcaaggtagtagacctaaaacaaagttgggaggctcaagtatgggtatcattcgcacttgtaggttagggcccgatcaagtgaaatctatgcgagctgctttagatctttttggtagagaatttggtgatgttgcaacttatagtcaacatcaaccagattccgactatttgggaaatcttttacgttctaaaacattcattgcattagcagcatttgatcaggaagctgttgtcggtgcattagccgcttatgttttacccaagtttgaacaacctcgttctgagatctatatctacgatttagcggtatctggcgagcatcgtcgccaagggatagcaacagcgttaatcaatttgttaaagcatgaagctaatgctcttggtgcctatgtgatttacgttcaagcggactatggagatgatcctgccgtagccttgtataccaaacttggaattagagaagaagttatgcactttgatattgatccttctactgctacttaacaattcgttcaagccgagtcacactggctcaccttcggtgggcctttctgcgtttatatactagagagagaatataaaaagccagattattaatccggcttttttattatttgaagttcctattctctagaaagtataggaacttcatttaaattacgtacacggcggccggttgatgaaattgtggagtagggtgggcaatgcccaccattaagactcaaagagagaactatgccacaggttgcttactactagcctcttttgctaagaatttttccaactctgttaaagcatccgcatctactttagtttgcataggacagaatttaggaccacacatagaacaaaattctgcttctttataaatatccgcaggtaatgtttcatcatggtattctcttgccctgtctggatctaaagatagctcaaattgacgattccagtcaaagttataacgagctttagaaagttcatcatctctatctcttgcaccggggcgatgacgggcaatatctgccgcatgagccgcaattttataagcaattaagccattacggacatcttcggcgttaggtaagcccaaatgttctttaggggtaacatagcatagcatcgcagtaccataccaaccagccatagccgctccgatcgcacttgtgatatgatcataaccgggagcaatatctgtcaccaaaggacccaaaacatagaaaggagcttctgagcattcttccatttgttttttcacattgaactcaatttgatccattggtacatggccaggaccttctaccattacttgtacatcatgttcccacgcacggcgagttaattgccctaaagtttttaactctgataattgagcctcatcagaagcatcatgggtacaaccggggcgtaaagaatcacccaaactgaaagaaacatcatatttcttaaagatttcgataatatcatcaaaatgggtgtaaaggggattttgtttatgatgatgcaacatccaacgggcaataataccaccaccacgggacacaataccagtgatacgattacgtactaaaggcaagtattcaattaaaatacctgcatgaatagtcatataatcaacaccttgttgagcgtgtttttcgatgatgtgtaaaaagtcatcggcggtaagattttcgatttttccgtgtacactttctagggcttggtaaataggaactgtgccaatgggtacaggagaagccttaataattgctgtgcgaatttcatctaaattaccgcccccagtggataaatccatgacggtatctgcaccatattttaccgctaagtttaatttagctacctcctcatcaatattagatgagttaggagaagcaccaatattcgcatttaccttacacttagaggcaataccaatgcacataggctcaagattggggtgattaatattagcaggaataatcattctgccccttgccacttcatctcgaatcaactcggcaggtaagttttctcttgtcgctacatagtgcatttcttcggtaataacaccttgacgagcatagtgcatttgagacacgttagcttgtccacgacgtttcgctatccattctgtacgcatattttttcctctataaacagctttcctacgctggtattacccagtctcaggttctaagggtttttctcagcctaacaaattagacacccctagctatgtgctaaattgtatcattatttgagtgagaatggctaatagtcaactccaatccccaattgctatttctcaacaatagatgtatgattatagagtagatacagttaagaaaatcttaaacaatcacactacttacttaaaacaatcgtatcattttcatgagacataggcacattagtcccgatagcgcccttggtttggtttctacttacagctttcctgccattgtgggaacggctgacatgatgttgaaatctgctgaggtgatgttagtaggttatgagaaaattggtgcgggacattgtactgctattgtcaggggaagaatcgcagatgtgcgtttggcggtggaagaaggggcgaaaatggcggagcaaataggtcaattacacacaaaattaattattcctcgcccgatgcctaatttagaggcagtttttcccattggtagccgtttggtggaggtagcacaacaaaaaagagggtttagccgtttaagtaatcgttcgattggtttgttagaaacaaaaggatttcccgctatggtgggagcggctgatgcaatgttaaagtcagcagatgtgcagttagcttcttatgaaactattggggcggggttgtgtacagtgatagttaggggttcagtggcaaatgtagcagttgcgatcgaagctggaatggctgaagcagaaaggattggcgacttgaatgcggtgatgattattcctcgactcctagaagatttagagcatactttacccgttgctaactattggttagagcaagaaaataaagagcatcctttacctacatttacgtcgagacagaaagaaagagcaaaacgtaaattagtggcattacctgaattagaaaaaatccctcttacttttgaaacaagagaaaaagttaagcaagaggcaaaattagaatctcagttagagttaagttctgagttggagttgagtcctgaaagtgatgatgagatatcaatctagaatgacggtgaaaacctctgacacatgcagctcccggagacggtcacagcttgtctgtaagcggatgccgggagcagacaagcccgtcagggcgcgtcagcgggtgttggcgggtgtcggggcgcagccatgacccagtcacgtagcgatagcggagtgtatactggcttaactatgcggcatcagagcagattgtactgagagtgcaccatatgcggtgtgaaataccgcacagatgcgtaaggagaaaataccgcatcaggcgctcttccgcttcctcgctcactgactcgctgcgctcggtcgttcggctgcggcgagcggtatcagctcactcaaaggcggtaatacggttatccacagaatcaggggataacgcaggaaagaacatgtgagcaaaaggccagcaaaaggccaggaaccgtaaaaaggccgcgttgctggcgtttttccataggctccgcccccctgacgagcatcacaaaaatcgacgctcaagtcagaggtggcgaaacccgacaggactataaagataccaggcgtttccccctggaagctccctcgtgcgctctcctgttccgaccctgccgcttaccggatacctgtccgcctttctcccttcgggaagcgtggcgctttctcatagctcacgctgtaggtatctcagttcggtgtaggtcgttcgctccaagctgggctgtgtgcacgaaccccccgttcagcccgaccgctgcgccttatccggtaactatcgtcttgagtccaacccggtaagacacgacttatcgccactggcagcagccactggtaacaggattagcagagcgaggtatgtaggcggtgctacagagttcttgaagtggtggcctaactacggctacactagaaggacagtatttggtatctgcgctctgctgaagccagttaccttcggaaaaagagttggtagctcttgatccggcaaacaaaccaccgctggtagcggtggtttttttgtttgcaagcagcagattacgcgcagaaaaaaaggatctcaagaagatcctttgatcttttctaatgcatgatgaatatagggtttctggggtttgttcactctcttttgggtcaaacaataatgtcagtagttcatataagctaatacccatgtattgagccaaattgtttaaattattaatagtaggcagtctctctcttcttatccaaccgtttaagctgaaagctgagactcctatttcctttgataaatctctataacttttctctccctttatcccatccaaaatattggataatctttcataaacatattcatatccttgcattagtatattctctcttaaatcgtatttcttggacattgccgtctagtattaatatcttatcgactaatagccatactatgttttttttatcagatggattcaacgtttcccagaatagtggagacgataaaacggcttccaactttttgttgtggatttttgagtaagtgacagactctagtttgcggatttggctttctatttcccttattgccttgtctatggctggattactcggtatcgctaataatgcctccctctgactccttaactttaataattctggtgtttctctctttgtattttttttgcttattaatgtcaatatatcccctgaatgttttattaactctcctataaataccttatctatcttttccagtcttgtgtattttgaatttgtacattttatttttttgtttatttttcccctacaacgataatatttacttggtgcattattcagtatgttacaggatgctccgcaataagcacaatagactttaccactgaaggggtatatagtgccaccactatgtcttctagtatgtttagactgattaaaggttaaatttatctcctgcctaacagagggtgatattatcggttcgtgggtattataatgaatctcacctgtgattttatataccgtatgaccatctaagactggattttgtaaccaagccctcaaaccttgatagctcaacattcctactccatagtattctagtatcaacgttagggttttgcctacagatttacacttaaggtacgtatctattattctctgtgatattttatatttactatattcttgtctatcttttatggtacacagatatggtttatggtctaggacatatttgccattcttaagagcataaccaaaagaaggtttaaacatcattagtttattatcccttcgatgttgaaatccgtgttttatcttctctgataacctatcactctcactttgggcaaaactcgccaatatattaaagtgtagtctcccatccactgtactcatgtctattttgtcatctaatgctcttagagtacaattatattcttccatttgctttactatcttatttagttctaatacacttcttcccaatctgtcgagtcgggttataattacttcattcactattccttgtttaattaagcatatcaatgattggagtccttccctttctttgtctttgtaccccgactcgacatctactattatcctttctaccccctccctctctatcctttgcctttgttgttccaacgcatttgatttttccgattgttcccttgtgcttacccggcaatatcctatacgcatctttatgttttcttctcttttctatagtctattttatattttcctacagctaattgaacatgaatttaaaacagaatctaattgaattgccttcggatttgaatgcaaaaataattcctcatcatgtagcagtgataatggatggtaatgggcgttgggcaaaacgtcggggtttccctcgtattgtaggacatcaaaaaggtgttgacactctgaaaagtttattacgttgttgtgacgattggggtattaaagttttaactgcctatgctttttctacggaaaactggggaaggcctgtaactgaggtagaatttctcttaactctttttgaaagggttttaagaaaagaattagcacagatgatggaaaaaaatgtcaaaatccgttttatcggtgatttaaaggctttaccagagtctttacaggcagaaatctatcattcaatggaagagactaaatataataagggtattaagtttaatattgctactaattatggtagtcgtcaggaaattctccaagcctgtcgtacgatcgcatcttctgttcaagagggtaaaataaatttagaagatatagacgaggaattatttgaaagtcatctttacactaacggcttagaatccccagatttattaattcgtaccagtggtgaaatgcgtttgagtaactttttgttatggcaaatggcatacagcgaaatttatgtaactaatactctgtggcctgattttaatcgggaagaattccatctggctttgctcaattatcaacaaagagacagacgtttcggcaaggtgaaagaataaaaataattaagtaccgtaaatcattagtttattaaggaatgacacataatttaccccgtcaacgg

SEQ ID NO: 95 - DNA, 7139 bp, Cyanobacterium sp. ABICyano1
tcgacttctgcaggaagttcctattctctagaaagtataggaacttctgagaaaaagtgtaaacaaatattaagaaaaagatcagaaaaatttaacaacacgtaataaaaaaatgcgtcactacgggttataaatttacatgaaaggttaaaacacttttctgagacgattttgataaaaaagttgtcaaaaaattaagtttctttacaaatgcttaacaaaaacttggttttaagcacaaaataagagagactaatttgcagaagttttacaaggaaatcttgaagaaaaagatctaagtaaaacgactctgtttaaccaaaatttaacaaatttaacaaaacaaactaaatctattaggagattaactaaaaccatggtaagatcaagtaacgacgtaacccagcaaggtagtagacctaaaacaaagttgggaggctcaagtatgggtatcattcgcacttgtaggttagggcccgatcaagtgaaatctatgcgagctgctttagatctttttggtagagaatttggtgatgttgcaacttatagtcaacatcaaccagattccgactatttgggaaatcttttacgttctaaaacattcattgcattagcagcatttgatcaggaagctgttgtcggtgcattagccgcttatgttttacccaagtttgaacaacctcgttctgagatctatatctacgatttagcggtatctggcgagcatcgtcgccaagggatagcaacagcgttaatcaatttgttaaagcatgaagctaatgctcttggtgcctatgtgatttacgttcaagcggactatggagatgatcctgccgtagccttgtataccaaacttggaattagagaagaagttatgcactttgatattgatccttctactgctacttaacaattcgttcaagccgagtcacactggctcaccttcggtgggcctttctgcgtttatatactagagagagaatataaaaagccagattattaatccggcttttttattatttgaagttcctattctctagaaagtataggaacttcatttaaattacgtacacggcggccgaattaatggtttttcagagtgtggttatgataaattatgtcttaaaaaggtttcaggtggcaggtagcaggtgtcaggttaaataaaaataaaaaatttataaaatttaagttttaaaatccccttttccctttttcaacgaacaatttatcacgacgagaagtgatagagtcaaattaattagttagaactaaagagagatttaactaatgttttagttttttcgtctaaagtctgccagtttaactgtccatcctcttcaaaaagagttttatcagttgttacaggttgagtagtgctttctgaatagttattgaaacaaacttgaaaacataactcccaaacattatttttttctgttttattttcctttttaatagcaacaatataactgggaaaaggttcattaatttcttcataactaacatcataattagataattctgactccttacgaatattatctaagagacgaataaaaatgggttgcattaatacttgtgctaattcatattcttgggcgtttttaaatttaggttcaatcatggatttctttttgatatttaatacttctatatattagttagtttgataaactattttataaataattctgctgatggttagtattttttgaacattactaatattatttttcaattgtcgatatttttctttaatttttttgatttctaaagctgttgttagaatagataaggaaacctctttgataattaaaggtaagtttttattgatataaattagcctagtattcagagtctttaaatattttttgattctgatgagttgccataataaataaaaattaattacacaaataaatatattaaaagatagtataaaaattaaagacatcaactacttatatttaagtttaaaaaataaaattgtacctgccaaaattaaggtaacaatattcgtaactaggacaggaatatccatgataaataatccataaataatccataaaataacccctaaacaaaagcaaagaaacatggctaaagatatatcttttgcagatttacttctccaagttttaatcgcttggggcaaaaaagaaatagtggtcaaactaccagccatcaaacctataattgttatccattccatatatttttattaaacattaattattaataaatgaagttattttacagtagttatgatcaataatatttctcaaaaaagtttcaggtggcaggtgtgaggttgttgggaggaaacaagtaatgagttaggatttaggagttaggggtttttaatttttaattcttaattcttaattatcaactatttacctttgcccttttccgtaacttttaattacaatttgatatttttcaatgacaaacgaggatcatcttgactaattgagcgaattttttcataatattctttttcctgatcagaaatatttttaggagttgcgatcgcaattttcactaataaatcaccattacccccttttggattactccagcccttgcctttaagacgtaaagactgcccgtgacgaatacccgcaggaattttaaccataacttccccttcaggagttggcacattaacttctcctcctaaaacagcctcataaggagtaattggcacttcacacactaacttatcatcctcaaaagagaaaaaatcatgaggctttaattcaacctttaaatataaatctcctttatgattactgatagggttaatttgcccttttcctttcaatctgacttttgtgccattttttgcccccgcaggaattttgacagtaacgatttctgaacctaaatctaattttgtctgtaccccatgataggcttgataataggtaagagtaatgcttttttcaatatcatttcccctcccttgactagcagttgtaccagtattaaaaccgccaaaatcactaaaaccagtagtttgagtgcgtgtattaccaaaaggtcttcctagtaaatcagcaataaactcgtcaaagctattatacttaccaaaatcaaaatccatatcattagaacttcgtgtttgataggtattaccccaagtcgatgtatttctgcttgtagttctttgtcccatgggtctgccataacggataaattggtcatattttttccgcttttccgtatctcctaaaacctcataagcctcgctaatttccttaaatttttcctctgccgctttgttatcaggatttctgtcagggtgatatttaacggctaatttacgaaatgctttttttatctcctctccagaggcttttttatctactcctaacactgaataataatctttgaattccattccttgcatagttgattttttcttctcaggttaaaataatattctatactttgatcacaaataacataaagttactatttcttgtaaaaaagtcggggatagtcgaaaagatgtagtgattgagatatcaatctagaatgacggtgaaaacctctgacacatgcagctcccggagacggtcacagcttgtctgtaagcggatgccgggagcagacaagcccgtcagggcgcgtcagcgggtgttggcgggtgtcggggcgcagccatgacccagtcacgtagcgatagcggagtgtatactggcttaactatgcggcatcagagcagattgtactgagagtgcaccatatgcggtgtgaaataccgcacagatgcgtaaggagaaaataccgcatcaggcgctcttccgcttcctcgctcactgactcgctgcgctcggtcgttcggctgcggcgagcggtatcagctcactcaaaggcggtaatacggttatccacagaatcaggggataacgcaggaaagaacatgtgagcaaaaggccagcaaaaggccaggaaccgtaaaaaggccgcgttgctggcgtttttccataggctccgcccccctgacgagcatcacaaaaatcgacgctcaagtcagaggtggcgaaacccgacaggactataaagataccaggcgtttccccctggaagctccctcgtgcgctctcctgttccgaccctgccgcttaccggatacctgtccgcctttctcccttcgggaagcgtggcgctttctcatagctcacgctgtaggtatctcagttcggtgtaggtcgttcgctccaagctgggctgtgtgcacgaaccccccgttcagcccgaccgctgcgccttatccggtaactatcgtcttgagtccaacccggtaagacacgacttatcgccactggcagcagccactggtaacaggattagcagagcgaggtatgtaggcggtgctacagagttcttgaagtggtggcctaactacggctacactagaaggacagtatttggtatctgcgctctgctgaagccagttaccttcggaaaaagagttggtagctcttgatccggcaaacaaaccaccgctggtagcggtggtttttttgtttgcaagcagcagattacgcgcagaaaaaaaggatctcaagaagatcctttgatcttttctaatgcatagaagttaaaatgatgatcggagtattgcgaaaaagagataatttgcgtaaactggcacaaatctcataaccgttagtatctggcattactaagtctaaaaaaatcatatctggttttgaggctaaaattttggcgatcgcctttaggggttctgtaatacctaaaaatctgtatccagcttttttaagaataatattcatggtttcgcaaattagagggctatcatcgatacaagcaatcaatggtgttgctgtttccgcttcttggacttctgtaactggggaaatgggtgcaggtaaatcagccacagaaactaaatcaatgtaaccttgttgaatataggggagtaaagaactactaaactggggtaaatcccgtttaaattgtaccgctaaatctcttagagtgttcctaccattgaataatttttggaaaatttcataggttttcggtgatgtttttgcttgtaattgttttgcagagcgtattacaggggctttgttaggactgcgatcgcctaatcttaagttaacccattgttgccattgttgccatgcgggtacgataacttgacttgcgtcaagaagacaaatttgctcctcaaggggaatatgtaccttactattaagaaaaaaactgatttccagagtttgattgagatcaaaaaaaatctcgataaagatattattcaccattttgataacgccatctctaccaactttgccttctaaaagccaatgacgcaccaactcatattcccaacaaaacttaatcttgtccgaagagatagattttatttcctgctctaaaaaaacttgatctgatgccacttccggaagaaaagccgctaaattacgacgccaacgcctgacagaatgattccctcctgtagcacaaatcaatctacccatataaagataaaatcgccattgttcttttcccggatgtactaactgtaattcaccactaaactgatgctttttcaaaacattaaacagataactttgttttgatgccacaaaacctttaatgggaatactactatgattttcttggtttggcgtttccattagtggtatatcaaatctattcgagctttaattatgttgatcttagtataatatttcaattaggaattagtaattatcatctaaaatccaatacctaaaatccgaaaccaaaagctctacacctaaataatgcgtactattaacgaaattaacgaaaaaatactacagaaaaaagcaagagtttgcaccatcgaagaattaaaagcgaaagtaaagaaaataggcataaagaaaacttatgaaaaagtcgatgtaatttgtgctggtacttttgaacccatggagtcttcaggggcaattttaaatcttggtcataccgatccccccatgaaaatacgtcattgttggttagatggtgttcctgcctatgctggttttggagctgtggatctttatttgggggcaacggctttgcctgatgtcaatgatgcggaaaatacggttattcctgaaaagggaggggctcatgtgattgaaagtctcattgcgggaaattctgtttccgttaaagccatcggacaagttactgattgttatccccgtgcttctttcgatgcaacgattaatattaactccataaatcagttttacttatataatcctcgtaatttgtatcaaaattttattgtgggggtgaatggaggcgatcgcatcttatatacttatttaggacctttgttgcctcgcttaggtaatgcggtttattctaatatcggggctttatcacctcttttaaatgatccttacctagaagcgatcggtattggtacaaaaatattcttagggggtgcagagggtatgataacgtgggagggtactcaacattttcccttacaaaaaagaagcactaatggtactcctattgggcctgcttccactttagcattagtaggagatgcaaaaaaaatggatcgtaaatgggtgaggggttgctactttaaaaattatggagcatctttaatgttaggggtggggattcctttccccgtgttaaatgaaaaaatcgttgaaaattgtgcggtggaagataaagatatttatgctcccgtgatggacttttctattcctcgccgagtgcgtcctagttttggtttagtcaattatgctcaacttaaacagggtaaaatcaaaattgaaggacaaatagttaaagtagcttccgttgctagtctttatctttctcgtcaggtagcagaaaccttaaaacagtggattttggatggtaaatttactttgactgaagcagtttctcctttaccttcatcgacaacttttatttctcaggatggtgtcaattaacttctgtttggggagtaatcttagaagttaagaagtaatagtaatgagtaatgagttgaaatcagaagttttttattcttcattattattgtggaaatataagtcatgtataaaagtagtattttatggtgttttaatcctgatgaaaatataccagag

SEQ ID NO: 96 - DNA, 6173 bp, Cyanobacterium sp. ABICyano1
tcgacttctgcaggaagttcctattctctagaaagtataggaacttctgagaaaaagtgtaaacaaatattaagaaaaagatcagaaaaatttaacaacacgtaataaaaaaatgcgtcactacgggttataaatttacatgaaaggttaaaacacttttctgagacgattttgataaaaaagttgtcaaaaaattaagtttctttacaaatgcttaacaaaaacttggttttaagcacaaaataagagagactaatttgcagaagttttacaaggaaatcttgaagaaaaagatctaagtaaaacgactctgtttaaccaaaatttaacaaatttaacaaaacaaactaaatctattaggagattaactaaaaccatggtaagatcaagtaacgacgtaacccagcaaggtagtagacctaaaacaaagttgggaggctcaagtatgggtatcattcgcacttgtaggttagggcccgatcaagtgaaatctatgcgagctgctttagatctttttggtagagaatttggtgatgttgcaacttatagtcaacatcaaccagattccgactatttgggaaatcttttacgttctaaaacattcattgcattagcagcatttgatcaggaagctgttgtcggtgcattagccgcttatgttttacccaagtttgaacaacctcgttctgagatctatatctacgatttagcggtatctggcgagcatcgtcgccaagggatagcaacagcgttaatcaatttgttaaagcatgaagctaatgctcttggtgcctatgtgatttacgttcaagcggactatggagatgatcctgccgtagccttgtataccaaacttggaattagagaagaagttatgcactttgatattgatccttctactgctacttaacaattcgttcaagccgagtcacactggctcaccttcggtgggcctttctgcgtttatatactagagagagaatataaaaagccagattattaatccggcttttttattatttgaagttcctattctctagaaagtataggaacttcatttaaattacgtacacggcggccgccttcagttcggtttaagaatatccgataaggttaggtgtcaggtgtcaggttgcaggttgcaggtgagagggggaagtcggggcttagggttttaggggggtaggggtgaatatatttaacgtcagttcggattaaagcaattttatcgttatttctaagaagctataaggttttctgactacgagaaaataatgctttcagcttatccaaaactcaagttaattaaaaaagggcaaaggtaaatagtgttggggtgaatagtgaataattaataattaataacttctaactcttaacccctaactcctaactcctaactcctaactcctaactcatttctccctctctccctattcccttatcccccaatcaggacttaatttcccgtaccaaagttatactaacccatcttccttgatcatcatattgtctaattaaacgtaatctcatattcgtttctactaaccaaccaaattcaagaaagaaactttgacgattttcaatttttacaggagtggtagaagatgcaccatcgggcaaaagcaaaactcgattttctttatttccctgattaaatgtaatgatgttatcattgatagtgcctccagaagaatagttcataaaaggggtttttagggtttgtttgagagtgtttccttctcgttttaaagttaattgagtttgatatggttcactattacgccagtctggatataatgttagcgcttctcctcgccattctccttctagttgttcaatggtaagatgctccctctctattccttctcctccctcccgaaattctcgaataagagtaacagagtcgaaattactatctttgtcaaacaattgtactaatctacaacggcgatcgcgccttacgtaaccatattctgccccgaaaacggaaaaaggactaaactgttgagagcctttggcaaaatgaccatcttcaaataaaaatatattacgattcaggctactaaattcattgactacaggattagggtttccatctctagccagagtaaatctaatggttttaccatcatcactaccgagagttaatttactggaagtctctttgagtaatttaccgtgaggagaaaactgactgaacgagcctaaccaaactcctgagttttttagtaaataagaccactgtgaggaagacataagacgatattttaattaaattaactgagattattttgttataaaactacgaacatcaggctataatatactatcataaatattgctaaaatttcccttaattgatactaataaaattgttagaatgaaccagtcaaaagaaatagataaagagaatttagttaaagaggttgctaaaataaaatactggcatcattacatagattttggtgcaggggtagaaacaaaaacaggaaaagaaggacgattttgtaagaaatttcaaaactggattttaagtggtattcctcaagatttaacaggaaaaactgttttagatattggtgcatgggatggtttttattctttttctgcggaaaaaaggggggcaaaaagagttttagccacagattcttttatctgggaacagaggcaattatatggtttagatgataatttttggcgtgattttggagcgggaaaacagggttttgaattagcaagaaaaatgtttaattcccaagtagaggattacaatattgatgttttagatcttaatcctgaaaaaattggtacttttgatgtggtattttttttaggggttttatatcacatgaaatatcctctttatgctttagaaaaagtaagaagtgttaccaaagagttgcttattttagaaactcatataagtttattttttagcttatttcctgtacctttaatgcgcttttatcctactaatgaattaagtaaagatgtaacaaattggactggtgcaaatatcgctttggttaaatcatggttgttaaccgcaggttttagtaaagtggagttagtcaaatggcggatatcaatctagaatgacggtgaaaacctctgacacatgcagctcccggagacggtcacagcttgtctgtaagcggatgccgggagcagacaagcccgtcagggcgcgtcagcgggtgttggcgggtgtcggggcgcagccatgacccagtcacgtagcgatagcggagtgtatactggcttaactatgcggcatcagagcagattgtactgagagtgcaccatatgcggtgtgaaataccgcacagatgcgtaaggagaaaataccgcatcaggcgctcttccgcttcctcgctcactgactcgctgcgctcggtcgttcggctgcggcgagcggtatcagctcactcaaaggcggtaatacggttatccacagaatcaggggataacgcaggaaagaacatgtgagcaaaaggccagcaaaaggccaggaaccgtaaaaaggccgcgttgctggcgtttttccataggctccgcccccctgacgagcatcacaaaaatcgacgctcaagtcagaggtggcgaaacccgacaggactataaagataccaggcgtttccccctggaagctccctcgtgcgctctcctgttccgaccctgccgcttaccggatacctgtccgcctttctcccttcgggaagcgtggcgctttctcatagctcacgctgtaggtatctcagttcggtgtaggtcgttcgctccaagctgggctgtgtgcacgaaccccccgttcagcccgaccgctgcgccttatccggtaactatcgtcttgagtccaacccggtaagacacgacttatcgccactggcagcagccactggtaacaggattagcagagcgaggtatgtaggcggtgctacagagttcttgaagtggtggcctaactacggctacactagaaggacagtatttggtatctgcgctctgctgaagccagttaccttcggaaaaagagttggtagctcttgatccggcaaacaaaccaccgctggtagcggtggtttttttgtttgcaagcagcagattacgcgcagaaaaaaaggatctcaagaagatcctttgatcttttctaatgcatcattcgcccgtacaagagttaggagtttttaattcttaatttttcccttgccctttttactttgccttttgcccattgctctttgtatgacttgttggagaagtctattgataactcatggggtcaaatagagatactatccaacctaattttatcgcttctgagatgcgatcgagggtttcttctcgactaaaaccaaaatgggtttcttcctgaagaatagcagtaacgcttaagtgtccattacaacttcttaacaaacgggcttcatcttcgctaatagttcttatttccacttgattatcaggtttgcgccaaatcaaataaggctttctttctcctgcaatgaggtgtctgggttcaatggggcatttatgggctttggtgaggggaactaagcaataacaggaaaagggaatgcgagtaccatgttctaatttggggcgataaccatgaagtttttttactcggagacggtgtaataattcctttggattattttttcttaaagtaggggctgtttctgctcttcttagtcgccattcggtgagagcaacatcaattaatagtcttgaccaatcaatagtttgttcttctatagtaggtatcaaaggctcgaaaaattctggtttaactacggtgagataatccataaaactattggcatagtctaaaacggtgacattatcacaatgactatgaaggtaaaaatcatcgacgaagcgatcgaataattctgatcccataatcgcttcacaggcaggaaatatctcatgaaaaggtgcgatcgttctcgttctagccctatttaagtataagtctaaaacctcttctgtgtttctttgatgagcgggaataataatactttctaaccaaggagaatttttgtctgttctcaaacttttgagaaattgctgttctagctttaaaagggtgggtgatttcatgaaattttaggaatattaaccaatgtaaagaagaatggatattttatagaccaagtttatcatatggattcgcaagaaaataattaagcaatgattaaaatcagggaaaatacggaaaacaatacctagatattttcggttttctctccctattaaataagaaggatatgacaagataaaaataacaattgaaaattaaataaatatcaattgaaacagaatttgttaggaggtaaaagtatggctattgttcgttttaatcctttgtatgaaattaatagcttacatcgtcaaatgaatcgactactagatgaaataactgcatgggatgatactcctaattcatttctcaaacctgcagtagaattgttagataatgacaatagtttaatgcttaaagttttagtacccggaattgacaaaaaagatcttgatgtcagtgttacccgtgatagtgtgaaggtaagtggtgaataccatcgtcaagaagaaaataaagatactggttactacatttctgagtttaattacggtaaatttgaacgcacaattaatttaccattaccgatcaaaaatgaccaagtaaaagcagaatataatgacggtgtcttaacgttaattttaccaaaacttgaagacgagaaaaataaggtatttaaagttagtttaggagcagaggaaaaaccagctttagaatcagaaagtaatggctaatattgttctaaaaaaggtttaatgcttactaaataaataattaatttgcctgtctcaaaaagacaggttttttttatgaaagtaataagaaataagtagaagtgaggagttggaaagataggattaagaattaggagttaactattttcattctttattcttccattgcccattgagaaatcatatctaaaatcagcaacgccaaattttagatgcaaaataaccataaataaaatgcagaaaaaagaatactttagatcttccgtatcagaagatacatttcttaacaaaatctggtgacaagattaaacacacgaaatccgaggttttatatattgattagtcctagg

SEQ ID NO: 97 - DNA, 6225 bp, Cyanobacterium sp. ABICyano1
tcgacttctgcaggaagttcctattctctagaaagtataggaacttctgagaaaaagtgtaaacaaatattaagaaaaagatcagaaaaatttaacaacacgtaataaaaaaatgcgtcactacgggttataaatttacatgaaaggttaaaacacttttctgagacgattttgataaaaaagttgtcaaaaaattaagtttctttacaaatgcttaacaaaaacttggttttaagcacaaaataagagagactaatttgcagaagttttacaaggaaatcttgaagaaaaagatctaagtaaaacgactctgtttaaccaaaatttaacaaatttaacaaaacaaactaaatctattaggagattaactaaaaccatggtaagatcaagtaacgacgtaacccagcaaggtagtagacctaaaacaaagttgggaggctcaagtatgggtatcattcgcacttgtaggttagggcccgatcaagtgaaatctatgcgagctgctttagatctttttggtagagaatttggtgatgttgcaacttatagtcaacatcaaccagattccgactatttgggaaatcttttacgttctaaaacattcattgcattagcagcatttgatcaggaagctgttgtcggtgcattagccgcttatgttttacccaagtttgaacaacctcgttctgagatctatatctacgatttagcggtatctggcgagcatcgtcgccaagggatagcaacagcgttaatcaatttgttaaagcatgaagctaatgctcttggtgcctatgtgatttacgttcaagcggactatggagatgatcctgccgtagccttgtataccaaacttggaattagagaagaagttatgcactttgatattgatccttctactgctacttaacaattcgttcaagccgagtcacactggctcaccttcggtgggcctttctgcgtttatatactagagagagaatataaaaagccagattattaatccggcttttttattatttgaagttcctattctctagaaagtataggaacttcatttaaattacgtacacggcggccgcggtggtttaagattcggaattaggaaaaaggtttcagatgtttttaattattaattatcaactataaactattcaccattgcccattgccctttttataattcataattcactatcaactaatcatgatttagtcaaattctagtaaactttaaaggttagggtgttttgatttcctacagctaagtataaaatagactatcttttttattgttttatcaaatctttacataaagcaattgacttttttttcagacgtttctatgatttatataacactcgtatgtttgataggtataattcaatgccaagaagaataataaacattgataaaagaccaaaaaacttctacttaaaacaggaaacagtagatgagataaagagactatcgtatgagtacgacactacacaatctattgttttatcagtgttggtggacaacaaaccaccgaaagcagtactggaaaaaatgattgcaaaggaaaaagaaaatcatggctatatctgaagcagtccatatctacctcaatattgtcaaagaacatcaccttgatgaactttgttgtatggtcttaccgacaaaaaaagactgctgtacagaaccttgcattaattaccaaatcgctaaaaggaagattgtacgctcaatgaaaatgatagaaagtaaatctgcgtttctcaacaaactaaacgagattgctgacaatgttgattctctaatccaatacttctcagaatctgaaaactctaaacattatcaacaggtggttggtgaatatatcgaaaccattcactgccaaatctatgaactaaacaacctacataaagagaacaaaaacaatggataagcctatatattaccaaataactagagaagaactatcagaaatgagagagttaatgaacaatatatctctggtatatcttgttcttaaactagaaaacccattctgtgaccgtcctatcaaaatcaaccccataaagattgcttcggattggaatatctctacaagcagtgtctatgaaactatcaacactctcagaaaaaaaggattagacatacaaactatacaatcacccattgaacaaggagaataattatggatactgcttttttcaaactaactccagaccttgtacttaaaatctctcaacttaaccttaatcagtctgaattaaaactctggatgtacttgtcatctcttgaaccatttggggatagacggataatgttacctacttcccaagatatggctaaacgtcttaatatgtcagttgcttctttcttccgtgctaaagctaaattgcaagaacttcaacttttctcattcttcgacaaatatactgagttcattaataatcttggttataattctcatcataaattagtacatcaaaaccagtctcaaatctgcgatagtgactctcaaatctgcgatagtaactctcaaatctgcgaggtagtatctcaaatttgcgatactacaaatcaaatctgcgatagtgactctcaaatttgcaaaaacgaacctttgaaacccttacaagacaaagattttgactcctctcagactattaagactattaagactatctcatactcctcagacagagaaacactcttgaaagagagagagaatattgatttgtcttttaaagaagacggggaaacctacaaggtttgcccacaggtggcaaacacagcccctcattgtggtcaagatgataaggtaaataccgaaagctctaagacaacaaacctaaatactcaggttatctctcaagacaatagtgtaaataaccctgtctcaacacaagctagtcaacataacactttttctgctgaacgtagtgcagttgaaaacacccagattcacaagaagggattagtagcgatgtcggatgttatacagcaatcgcctaatactcctcctaatccatctaaggtacaaataaaagcatgggaatggttgcccgatggagaatggaaggttgaccataaacttgaccctattttccatgactggttagccgatatcaatctagaatgacggtgaaaacctctgacacatgcagctcccggagacggtcacagcttgtctgtaagcggatgccgggagcagacaagcccgtcagggcgcgtcagcgggtgttggcgggtgtcggggcgcagccatgacccagtcacgtagcgatagcggagtgtatactggcttaactatgcggcatcagagcagattgtactgagagtgcaccatatgcggtgtgaaataccgcacagatgcgtaaggagaaaataccgcatcaggcgctcttccgcttcctcgctcactgactcgctgcgctcggtcgttcggctgcggcgagcggtatcagctcactcaaaggcggtaatacggttatccacagaatcaggggataacgcaggaaagaacatgtgagcaaaaggccagcaaaaggccaggaaccgtaaaaaggccgcgttgctggcgtttttccataggctccgcccccctgacgagcatcacaaaaatcgacgctcaagtcagaggtggcgaaacccgacaggactataaagataccaggcgtttccccctggaagctccctcgtgcgctctcctgttccgaccctgccgcttaccggatacctgtccgcctttctcccttcgggaagcgtggcgctttctcatagctcacgctgtaggtatctcagttcggtgtaggtcgttcgctccaagctgggctgtgtgcacgaaccccccgttcagcccgaccgctgcgccttatccggtaactatcgtcttgagtccaacccggtaagacacgacttatcgccactggcagcagccactggtaacaggattagcagagcgaggtatgtaggcggtgctacagagttcttgaagtggtggcctaactacggctacactagaaggacagtatttggtatctgcgctctgctgaagccagttaccttcggaaaaagagttggtagctcttgatccggcaaacaaaccaccgctggtagcggtggtttttttgtttgcaagcagcagattacgcgcagaaaaaaaggatctcaagaagatcctttgatcttttctaatgcatcggggacaaatgtaaattttctgctactttaatttttgattcaataataaaattcatttattccatgaacaattaactatgtctttatctttaatagacatctggtggaaaatattaatataggctcgtagttagggctttagcccttattttgagaattgttggagatgtctaattattatgattttaatattggtttgtagttagaattttaacccttatatattaaacatttggaaaaaataatttttttactttaaactttttggctcttctacaatggttattataaattaatagaaaagaatttctgtaatgcctactgaatattattcatggcaaaatacaaactaaaaatttataaattattatttaataattgcctatttcttaacaaacatcaataatttacacgacgagaagtgatagagccataattttagttatttatatgatttaaaaaaaatcatttgtcaattattttatcctacttctttgatttaggtagatgagtaataccggcgttagcaaataaattaagtttgccttctgagatgctaattttatctacttgtaaataaattccatctattaataaattttctaaatttaaaacttttcccacttctgctaataaaatctttactactgttgctgaccaactttctccttgagtacaagcaaattcatctaaaataataccttttttatgctgacaaatacgaggctttataattaaacaaatactctctaatttattactattttgttcttttaatttagctttaatcgcaattctaccatcagacaaaatccgaaaatctactcttttaaaaaatacttttgatgcggtagggtattgtcctaatttactattaagattatcaacatttaagattgtttcaatatctgtttcgttaagaataatacgggcttttcctcgactaggttgggttaattccacatttcccattaaagccttaaaaggactaacagcaatatcattgagggtgattctcattttttccaaagggagattttcccgcatcattaaaccatttccatcaatatctaatgattctaaaatccccttggctaattgttgtggatttgtttttacttgtacacttaggtatttagcagatttgatttgacttttaaaagccatttccgcaattttattgatagttttttccccaatagtgtcgaatttgcccagtaacatattgatttattataaaaataagggtttttacttaaattttagagttattttaacatttttctgagaataaggtttaataaaacttaatgaaaaagtagtttaactgagagtacaagatttgagtaagattaactcaatgtgaaaaatattgatacttgacggagattaattccatgacagagttacctatttatgatttagtgattaataatggattattcgctcaaatggtagaagaccctgatattttaggtcaaatgtctgatgcttggaaaaattttgttgaatctggacaaatttgggctttgttgattggtgtattttttggttatatttttgcttcttttactcgtttttagaacaattaaagttataaataatggctctatcagtttgagtatgtaaattattagttagggtaggctgaaaggcaagaggcaataggggattattaaataataatttataaacttttagtttttattttactataaacaccatttaataaaggttatggaagtcctgtttctcttaattcatcataaccacactctgaagaacctaaataattaatttgtttattttcacctctttgattgattaataaatgttcagaaaatctttaccgtcaaacctaccaccatgagggttgaacattcttcaacccctaaaatctgtccttatctgatatttttgccgaaaaactgaggtgattttggtcaattacaacactaactagatgacatttttaatatttgattcaataatatttactacgttagttgattattaattttgaactgtgacg

SEQ ID NO: 98 - DNA, 5935 bp, Cyanobacterium sp. ABICyano1
tcgacttctgcaggaagttcctattctctagaaagtataggaacttctgagaaaaagtgtaaacaaatattaagaaaaagatcagaaaaatttaacaacacgtaataaaaaaatgcgtcactacgggttataaatttacatgaaaggttaaaacacttttctgagacgattttgataaaaaagttgtcaaaaaattaagtttctttacaaatgcttaacaaaaacttggttttaagcacaaaataagagagactaatttgcagaagttttacaaggaaatcttgaagaaaaagatctaagtaaaacgactctgtttaaccaaaatttaacaaatttaacaaaacaaactaaatctattaggagattaactaaaaccatggtaagatcaagtaacgacgtaacccagcaaggtagtagacctaaaacaaagttgggaggctcaagtatgggtatcattcgcacttgtaggttagggcccgatcaagtgaaatctatgcgagctgctttagatctttttggtagagaatttggtgatgttgcaacttatagtcaacatcaaccagattccgactatttgggaaatcttttacgttctaaaacattcattgcattagcagcatttgatcaggaagctgttgtcggtgcattagccgcttatgttttacccaagtttgaacaacctcgttctgagatctatatctacgatttagcggtatctggcgagcatcgtcgccaagggatagcaacagcgttaatcaatttgttaaagcatgaagctaatgctcttggtgcctatgtgatttacgttcaagcggactatggagatgatcctgccgtagccttgtataccaaacttggaattagagaagaagttatgcactttgatattgatccttctactgctacttaacaattcgttcaagccgagtcacactggctcaccttcggtgggcctttctgcgtttatatactagagagagaatataaaaagccagattattaatccggcttttttattatttgaagttcctattctctagaaagtataggaacttcatttaaattacgtacacggcggccgcagttttatttctgaaggggggacaataactctaaaaaccttataggtagcaggtggcaggtattaggtgttaggttttgtatccattaatatttatcattatctccatttactcaatggttcaaataatgggcaaaactattggattatcaacattttgagataatatgtctggctatttatttcgtaaatacaaaatactgttcatgtatttaaaacctgcaacctgaaacctgaaacctctttccgaaaccctaacaaccaaatacttgaatatctttaaaagcacatacgggagaggcatggccaaccctaatggcttgatttggctctcccttgccacagtagggagttccataaaattctctggtggattcattccccacataaatgagattgtgccagaaatgttgggttactcctcgatagttggggtttctcagggttttagtaattttaccgttttcgattaattgggcatattcacaaccgaattgaaatttgttgcggtagtcatcaatagaccatgagcggttagatttcatataaactccaaattcgatcgcactaataatctcatggaaactactattacctgattctaagtttaaattagccatgcgatcaatggaaggacgattccaagaggaagagcgaaaattagccactccttgaatatttgacctctgctgactttcaaggctacctaatcccctaagtaagataccgtctttaattaagtattgtttttctgcttttagccctgcatcatcgtaaccataactggcaaattcccctttaacagtaggatcaaaggtaatattcatcaagggcgaaccataggcaagagtaccaaaatctgacaatttgacaaagctacttccagcgtaattacgttcatctcccaaaatgcgatcgatttccaaaggatgacctacactttcatggatttgcaacatcatttgatctggtgctaaaacaagggtagtagtcatgttcggacagtcttgggcaaaaactaactctaccgcttcttctcctatttgttgcacacgattgagggtaatttcagggttaaaaacttcctttcctgcttgataacatctagctaacattccgttatcacttcttttctgaataatattaccatcttgtgcgatcgcagcataatcagtttccacaagggaaaattgctgttgaatattcgccccattactactaacaaaatgagaggaaatatcactaattcctgccatagccgtagctttaaccactttatccgacacccgaaggcgatgacaaatttggactaataaatcatttaactcttggggatgaactaaattagcagattcagtaataggggattgataacttccctttgcgggaggtctaatatctgtattaaatttaaaaatactccatttactcgctttttcagcttgttgttgagcaacttctgccgcctgttgaattgcagattgattcaaatgattagtcgcacaatagcctatttgtccattaaccattacttccaccattactccatgatttattttcctgccgttactttggggtttgccgtctcggaaaatacgatgagtagtggtttcgtaaacttgtcttaatccgatccagtctgcattaatatcaagattctcaagggttttttcaagatctaacatttatttataatcaattattaactgatgttacgcaaaaagataattagttgttgttttgaggtatcaggtgtcaggtatcaggtgtcaggtatcaggtgtcagaaaaattcacccgatatcaatctagaatgacggtgaaaacctctgacacatgcagctcccggagacggtcacagcttgtctgtaagcggatgccgggagcagacaagcccgtcagggcgcgtcagcgggtgttggcgggtgtcggggcgcagccatgacccagtcacgtagcgatagcggagtgtatactggcttaactatgcggcatcagagcagattgtactgagagtgcaccatatgcggtgtgaaataccgcacagatgcgtaaggagaaaataccgcatcaggcgctcttccgcttcctcgctcactgactcgctgcgctcggtcgttcggctgcggcgagcggtatcagctcactcaaaggcggtaatacggttatccacagaatcaggggataacgcaggaaagaacatgtgagcaaaaggccagcaaaaggccaggaaccgtaaaaaggccgcgttgctggcgtttttccataggctccgcccccctgacgagcatcacaaaaatcgacgctcaagtcagaggtggcgaaacccgacaggactataaagataccaggcgtttccccctggaagctccctcgtgcgctctcctgttccgaccctgccgcttaccggatacctgtccgcctttctcccttcgggaagcgtggcgctttctcatagctcacgctgtaggtatctcagttcggtgtaggtcgttcgctccaagctgggctgtgtgcacgaaccccccgttcagcccgaccgctgcgccttatccggtaactatcgtcttgagtccaacccggtaagacacgacttatcgccactggcagcagccactggtaacaggattagcagagcgaggtatgtaggcggtgctacagagttcttgaagtggtggcctaactacggctacactagaaggacagtatttggtatctgcgctctgctgaagccagttaccttcggaaaaagagttggtagctcttgatccggcaaacaaaccaccgctggtagcggtggtttttttgtttgcaagcagcagattacgcgcagaaaaaaaggatctcaagaagatcctttgatcttttctaatgcattagactggaattgtactttagaactaattgagccagtatcaaaatcttgtaaatatattggcattagagctcatcatcttctttttcccaatataaatcaagagcatcaaatcaatactttttcttgttggttagcaacaattagtgaaactcaacatcgtgtgacactatacctcaagttaaacctaccaactaatcatcaggaagactataatctacaagcggaagtgttaaaagataaatggatggaattaaaagataaccctttcccttggaaaattcaaattttacccccaacaattatggtatttgataattaagggttgccgaaaaagtattttggtgaggggataaggtgagaggggataatgttcgataataatataacctagtcaaataggaaagaagctatttttatgaatcatacaaacagaagtcttgattggtttttgattacccttgtggtaggcattagtggttttggtagcttaatcatttataccacccaattatataaacagggttcggattggcaacaacaattaattatggtggtgattggaagtgctattttacttgggctatcttattttccctatgaattactactaaaatttcattggtttacctatggtttcacaaacttattattagtggctgtaattttttttggtactactattaatggggcgcaaagttggatttatattggtagctttaattttcagccctcagaatttgccaaaattggtttaataattaccctagcggctctattgcattttcgtgatgcttcaagggtatcccgtttatttcccattgcatcaacggttgcgttaccttggttattaattatggcacaaccagacttagggacagggttagtatttggggcgattactttcacaatgctttattgggctaacgctaatttaggttggattttattgattctttctcctctggtatctgctttcctattcaatttatttctcccagcatggttaatttttacggtggttatgattatcattgcttggtttactttacctagaggggctatttgggcattaattaccctgacagtaaattacatggctggaattttagggcatattttatgggacttgctcaaaccttaccagaaagaccgtttaactttatttttagaccctgaaaaagatccgttaggggggggataccatttaattcaatctcgcattgctattggctctggagagctttgggggaatggtttatttgagggtactcaaactcatcttaattttgtccctgaacaacatacagactttatttttagtgctattggtgatcaattaggctttgtcggtgcgatcgcaactttaatagtttattggtttatttgtttgcgattagtaatcatcgccaatagggcaagagacgattttggctctttaatcgccattggagttttaggaatgattgcctttcaaaccattatcaatatcggtatgactatcggattagcacccatcacaggaattcctttacctttacttagttatggacgttcatccctacttagtaattttatcgcttttggtatcgtagaagcgatcgcggctaatattcccaagaaaaatacatctttccgttaatcaatatttttcactattcactatagcgattctaaggggcaaaggaagaatcaagaattaagaattaagaattaagaattaagaattaaaaactccgaacacttattacttatctattatttattactggtttccccctctcccctcatcccatcatctccctatctcctaaacaccatgatacctgcaacctgaaacctgaaacctgacacctacctttactcgatatttttaaactgagctaaggttaactagaaacattcagactttagaaaataacagcttaagagtatgatagaaaattggtctatactaaacttttattgataatgacgag

SEQ ID NO: 99 - DNA, 6157 bp, Cyanobacterium sp. ABICyano1
tcgacttctgcaggaagttcctattctctagaaagtataggaacttctgagaaaaagtgtaaacaaatattaagaaaaagatcagaaaaatttaacaacacgtaataaaaaaatgcgtcactacgggttataaatttacatgaaaggttaaaacacttttctgagacgattttgataaaaaagttgtcaaaaaattaagtttctttacaaatgcttaacaaaaacttggttttaagcacaaaataagagagactaatttgcagaagttttacaaggaaatcttgaagaaaaagatctaagtaaaacgactctgtttaaccaaaatttaacaaatttaacaaaacaaactaaatctattaggagattaactaaaaccatggtaagatcaagtaacgacgtaacccagcaaggtagtagacctaaaacaaagttgggaggctcaagtatgggtatcattcgcacttgtaggttagggcccgatcaagtgaaatctatgcgagctgctttagatctttttggtagagaatttggtgatgttgcaacttatagtcaacatcaaccagattccgactatttgggaaatcttttacgttctaaaacattcattgcattagcagcatttgatcaggaagctgttgtcggtgcattagccgcttatgttttacccaagtttgaacaacctcgttctgagatctatatctacgatttagcggtatctggcgagcatcgtcgccaagggatagcaacagcgttaatcaatttgttaaagcatgaagctaatgctcttggtgcctatgtgatttacgttcaagcggactatggagatgatcctgccgtagccttgtataccaaacttggaattagagaagaagttatgcactttgatattgatccttctactgctacttaacaattcgttcaagccgagtcacactggctcaccttcggtgggcctttctgcgtttatatactagagagagaatataaaaagccagattattaatccggcttttttattatttgaagttcctattctctagaaagtataggaacttcatttaaattacgtacacggcggccgacattatataattggctctgttactttgaatatgatacatcaccgtcttgtcaattaaagtttgtgctaaatgtatattaaagacattggcgaacatcaattattatcaatcataaatcagtattgtgaccaaaccattaatggtgacgatggagcaattatcgcttttgatagtggtaaaaacttagtcgttaccactgatattttagtcgaaaatgttcatttcagcgatcgcactacacctccagaatccattggttatcgtggtgtaactgctaacttgtcagatatagccgctatggggggaatgccaataggtattaccgtaggtttatccctcagaggtgacacagaaattaactgggtagaaaaactttatcggggaatgaaaaaatgtttaactccatataacatcaatattgttggtggagacataactaaatctgaaactaacactatctccattacagccttgggaaaagtttctgcatctcacagtatctatcgccatcaagcacaagtgggcgatgtcattttagtgacaggtaatcatggactgtcaagggcagggttagaaatccttctctttcccgaaaaatatagtcatctaccctcacaaatcagagaaaaggttatttttgcccatcaataccctaaaccccgcttagaggtcataaaatacctatatgaactatgtcaatatggttatcgcattgcaggaatggatagtagtgacggattagccgatgctattctacaaatatgccatcaaagtaaagtaggggcaagactcgatcgcacctcaataattgttgatgaagcaattacgactattatcgggagaaaaaccgcttttgagtgggtgctttatggaggagaagattttgaattagtattatgtttacccttaaacttagctaagaaaatccaacaagaatttggagaaaaatgtcaaattattggtcaaataacatcatcattagaagtacaaataattgatcaagaaaatagcaatttacaactctcattaaatcagaaaaaaactttccagcatttttagttatactaatttatagcttaatgtacctgattagcttattattaaataatataagtattgttattaatatagtccatctactccccgtaatctttgagcgttaatcaaatcatgattaaaattttagtagtcgatgataatcacacacccagagaagtgatcagcgaagcactgaaacagtttaatatccaagtaaccgaagcatccaatggggtagaggcaaccaaaataattgagaaagaaaaatttaacctcgtaattactgatgtagtgatgcctgaaatgaatggctatgaattatgtcgttggataaaaagtaatccaggaacagaaaaagtccctgtaatcatttgctctacaaaaggagaagaatttgatattcactgggcaacaaaacaaggggcggatgcttatattattaagccttttaaaacgatggaattattaaaaaccattaaatatttacttaagcataatgtaggataaaactacctcttgaaaataacagtagaatacaattttcataatttaaaatcaatttggttctcttttcccttgtttgctgacttcaacaaaaaaatctaatcgggaattaggaacgataaatcagcaactataaacgaataaaaataagcgaactagcttaccattatgacaaatacaaatgtaattgtaatcggcggaggtttagctggtacagaagcaacgtggcaaatagctcaagctggtgtgcctgtaaccctttacgaaatgcgccctgtaaaaaatagccctgctcatcatagctcagaattagcagaattagtttgtagtaattcctttggtgcagatgcctttgatcgagcggctggtttattacatgaagaattacgccgtcttaactccattatcattcaaactgccgatgaacacaaagttcctgcaggagggatatcaatctagaatgacggtgaaaacctctgacacatgcagctcccggagacggtcacagcttgtctgtaagcggatgccgggagcagacaagcccgtcagggcgcgtcagcgggtgttggcgggtgtcggggcgcagccatgacccagtcacgtagcgatagcggagtgtatactggcttaactatgcggcatcagagcagattgtactgagagtgcaccatatgcggtgtgaaataccgcacagatgcgtaaggagaaaataccgcatcaggcgctcttccgcttcctcgctcactgactcgctgcgctcggtcgttcggctgcggcgagcggtatcagctcactcaaaggcggtaatacggttatccacagaatcaggggataacgcaggaaagaacatgtgagcaaaaggccagcaaaaggccaggaaccgtaaaaaggccgcgttgctggcgtttttccataggctccgcccccctgacgagcatcacaaaaatcgacgctcaagtcagaggtggcgaaacccgacaggactataaagataccaggcgtttccccctggaagctccctcgtgcgctctcctgttccgaccctgccgcttaccggatacctgtccgcctttctcccttcgggaagcgtggcgctttctcatagctcacgctgtaggtatctcagttcggtgtaggtcgttcgctccaagctgggctgtgtgcacgaaccccccgttcagcccgaccgctgcgccttatccggtaactatcgtcttgagtccaacccggtaagacacgacttatcgccactggcagcagccactggtaacaggattagcagagcgaggtatgtaggcggtgctacagagttcttgaagtggtggcctaactacggctacactagaaggacagtatttggtatctgcgctctgctgaagccagttaccttcggaaaaagagttggtagctcttgatccggcaaacaaaccaccgctggtagcggtggtttttttgtttgcaagcagcagattacgcgcagaaaaaaaggatctcaagaagatcctttgatcttttctaatgcatgtaatatcttagggcagttaggtgcaggtttaattactccttctgcggtagatgaattactccataactggcaaggaagattacaagagtctgctaatgtgccaaatttattcgccttagttttggctttacaaacagaggaaatccccgaagatatagcgactcaaaaggttttaactatttttgatcttccccaagattttgatttaactaaaacacccttatcacctaccgatgatcctattttaagtcaacaggtactaattttagaaaatcaactcactttgctatatcaattaggggggcaagttttacaaagtgcaggtattaccgactctcacgaagcacaatggttaattagtcgtgccactgctgaatatatttatcataatcctgacatcgatttaactgattcccaagtcattaaccaaattattgattctgcaattctcttttccacccttacagtggaagattctatcatagaaagtaaacgcgatcgcattgcttccgtaaatacaaccttagatgtaattaatcagggaaataataactatgaggaattagcgaatcaacaacaacaaattctcgataatgtcttagaatactcctctccctatcactatcctttacccttagttgtcaatcaaaatgaagaagaaaccctttacacccctcagcccattgatactaagtttcaaatatccgcccttaatgtatccgataactatgagttaggtatcaaaacccctgacggtgaatcgattatcctcttagaaaacttgcccggtagcgatgattctactttaactaatactttagatgagattaccgtagataccttaatgggtagtgaaaccaagttttttggctcattaattaacgcaccagagggtttagctacttttaccgatagtggtttagaattttatcttactattaatggtgaaacttacagttcacaaaatccagaacaactggaaattacctctaaaggcagtcaaggtttagccttaacttttaaagacgaaaatgacaccgttgcggaatttgccattaacacaccggtttttctcacccccggtttagacaagggcgagaataccaccattaatcttactattgcccgaagtgcggcgaatgaaaacaccatcggtatttaccaagtggatgatttaacaggaggaattataagaggcgatcgcactatcatgcccaatgatcccgaatatgataaaatagccattcagaaggcacaatcttcgggattaatatttgaaacccccgaaaacatgaacatagataactacaccatcgccttacctaatgctagtatttttggtttcttccttctggttaatggcaacacagaagaatatttgaatcaaggagaagaattagaagaatcaatttacagctttttctcttatggcagtgccaataaagacaacaggcaacattttacctcccttggcgataatatttttggctttgaggatacctttggtggaggtgataatgattttaatgacattttattgcaaatcaattatacagaggtttagctgtcattaacgttttttcttttaccctaacctctgttttgaaacaaaacctgataataaatatctccgaaaaacgaaggattagggtaaatactttgatttatgaacattttgaattacttggtgactcttacctttaccaatttcacttttttgcaatccctaagtataatttttggctctatcacttctcgtcgtgtaaattattcgttagggtaggcaagaggcaagaggcaagaggcaataggggattattaaataataatttataaacttttagtttttattttactataaacactattcaataaaggttatagaagttattttttattaatttatcataaccacactctgaagaacctaattttttaatgcagaattttgctaatttattttaacccacagatttctgcttggtagagatgtgctaatatagcattg

SEQ ID NO: 100 - DNA, 13083 bp, Cyanobacterium sp. ABICyano1
tcgacaattaataacttcttcctgtacgggcgaatggccatttgctcctaactaactccgtactgctttgcggaacgagcgtagcgaactctccgaattactaagccttcatccctgatagatgcaaaaaacgaattaaaattatgtgtaaaaagaaaatgtgtctttatttagtagtcaaagttacaaaatattaagaatcaaattaataatgtattgggcagttaagtatataagtctttaaatatttatttgtattcaatatattaaggaggatcagccttatgaattcttacactgttggaacctatttagcagaacgtttagttcaaattggtctcaaacaccattttgcagtagctggtgattataatttagttttattggataacttattgttaaataagaatatggaacaagtgtattgttgtaatgaattaaactgtggtttttctgctgagggatatgctcgtgcaaaaggtgctgccgcagcagttgttacttattctgttggagcattaagtgcttttgacgctattggaggtgcttatgcagaaaatttacctgtaatcttaatctctggtgcacccaataacaacgatcacgctgctggtcatgtattgcatcatgctttaggtaaaaccgattatcattaccaattagaaatggcaaaaaatattaccgctgccgcagaagctatttatactcccgaagaagcacctgctaagatcgatcacgtaattaaaaccgctctccgtgagaaaaaacccgtatatttagaaatcgcttgcaatatcgcttctatgccttgtgcagctcctggacctgctagtgctttatttaacgatgaagcatctgatgaggctagtttaaatgccgctgttgaagaaactttgaaatttattgctaatcgtgataaagtagctgttttagttggttctaaactccgtgccgctggtgcagaagaagcggctgtaaaattcgcagatgccttaggaggtgctgttgccacaatggcagccgctaaaagttttttccccgaagaaaatcctcattacattggtacttcttggggtgaggtatcttaccctggtgtagaaaaaaccatgaaggaagctgatgcagtaattgcattagctcctgttttcaatgattactctaccactggttggactgatattccagaccccaaaaaattagttttagcagaacctcgctctgtagttgtgaatggtgttagatttcccagtgtacatctcaaagattatttaactcgtttagctcaaaaagtgagtaaaaagactggcgcactcgatttctttaaatctttaaatgctggtgaattaaagaaagcagctcctgctgatcccagtgctcctttagtgaatgccgaaatcgcaagacaagttgaagccttgttaactcctaacactaccgttattgccgagactggtgatagttggttcaatgctcaacgcatgaaattacccaatggtgctcgtgttgagtatgaaatgcaatggggtcacattggatggtctgttcctgctgcatttggatatgcagttggagcacctgagcgtagaaacattttaatggtaggtgatggttctttccaactcactgctcaagaagttgcacaaatggtacgtttaaaattgcctgttattatctttctcattaacaactatggttacaccattgaagttatgattcatgatggtccttataataacattaagaattgggattacgcaggtttaatggaggtatttaacggtaatggtggatacgacagtggagcaggtaaaggattaaaagctaaaacaggaggtgagttagctgaagcaattaaagtagctttagccaatacagatggtcctaccttaatcgaatgtttcattggacgtgaagattgtactgaagagttagttaaatggggaaagcgtgttgccgctgcaaattctcgtaaacctgtaaacaaactcttgtagttaggatccagcaaggtttcatcccgaccccctcagggtcgggatttttttattgtgagctcaactttagatattcgtagttggcaatgtcgtaaatgcggaacaatacatggaaaacatatagatttgtaatgagaaaaagtgtaaacaaatattaagaaaaagatcagaaaaatttaacaacacgtaataaaaaaatgcgtcactacgggttataaatttacatgaaaggttaaaacacttttctgagacgattttgataaaaaagttgtcaaaaaattaagtttctttacaaatgcttaacaaaaacttggttttaagcacaaaataagagagactaatttgcagaagttttacaaggaaatcttgaagaaaaagatctaagtaaaacgactctgtttaaccaaaatttaacaaatttaacaaaacaaactaaatctattaggagattaactacatatgagtgaaactaaatttaaagcctatgccgtaatgaatcctggtgaaaaattacaaccctgggaatatgaacctgctcctttacaggtagatgaaattgaagtaagagttactcacaatggtttatgtcacactgacttacacatgagagataatgactggaatgttagtgagttccccttagtagcaggtcatgaagttgttggtgaagtaaccgctgttggtgaaaaagtaaccagtcgtaaaaaaggtgatagagttggtgtaggttggattcgtaattcttgtcgcgcttgtgaccattgtttacaaggagaagagaacatttgtagagagggttatactggtttaattgttggtcatcacggtggatttgctgatcgtgtacgtgtacctgctgacttcacttataaaattcctgatgctttagatagtgcatctgctgctcctttattatgtgccggtattaccgtttacactcctttaagaacctacattaaacatcccggtatgaaagtaggtgttatgggtattggaggattaggacatttagctattaaatttgctcgtgcaatgggagcagaagttactgcctttagtaccagtcctaataaagaagcccaagccaaagaatttggtgctcatcatttccaacaatggggtactgctgaagaaatgaaagctgttgccggtaattttgatttagttttatctaccatctctgctgaaactgactgggatgctgccttctctttattagcaaataacggtgttttatgtttcgtaggtattcccgttagttctttaaatgttcctttaattcctttaattttcggacaaaaatctgttgtaggttctgtagttggaggaagaagattcatggcagaaatgttagagttcgccgctgtaaatcagattaaacctatgatcgaaactatgcccttatctcaagtaaatgaagctatggataaagttgccgccaataaagccagatatagaattgtattattatctgaataactagatctacttctaaactgaaacaaatttgagggtaggcttcattgtctgcccttatttttttatttaggaaaagtgaacagactaaagagtgttggctctattgctttgagtatgtaaattaggcgttgctgaattaaggtatgatttttgacccctgcaggatcatcttgctgaaaaactcgagcgctcgttccgcaaagcggtacggagttagttaggggctaatgggcattctcccgtacaggaaagagttagaagttattaattatcaacaattctcctttgcctagtgcatcgttacctttttaattaaaacataaggaaaactaataatcgtaataatttaacctcaaagtgtaaagaaatgtgaaattctgacttttataacgttaaagagggaaaaattagcagtttaaaatacctagagaatagtctggggtaagcatagagaattagattagttaagttaatcaaattcagaaaaaataataatcgtaaatagttaatctgggtgtatagaaaatgatccccttcatgataagatttaaactcgaaaagcaaaagccaaaaaactaacttccattaaaagaagttgttacatataacgctataaagaaaatttatatatttggaggataccaaccatgtctcatattcaacgtgaaactagttgttctcgccctcgtttaaattctaatatggatgccgatttatatggttataaatgggctcgtgataatgttggtcaatctggtgctactatttatcgtttatatggtaaacctgatgctcctgaattattcttgaaacatggtaaaggttctgttgctaatgatgttactgatgaaatggttcgtttaaactggttgactgaatttatgcctttacctactattaaacattttattcgtactcccgatgatgcttggttattaactactgctattcctggtaaaactgcttttcaagttttagaagaatatcctgattctggtgaaaatattgttgatgctttagctgtttttttacgtcgtttacattctattcccgtttgtaattgtccttttaattctgatcgtgtttttcgtttagctcaagctcaatctcgtatgaataatggtttagttgatgcttctgattttgatgatgaacgtaatggttggcctgttgaacaagtttggaaagaaatgcacaaattgttacctttttctcctgattctgttgttactcatggtgatttttctttagataatttgatctttgatgaaggtaaattgattggttgtattgatgttggtcgtgttggtattgctgatcgttatcaagatttagctattttatggaattgtttaggtgaattttctccttctttacagaaacgtttatttcagaaatatggtattgataatcctgatatgaacaagttacaatttcatttaatgttggacgagttcttttaagaattaattcatgaccaaaatcccttaacgtgagttttcgttccactgagcgtcagaccccgtagaaaagatcaaaggatcttcttgagatcctttttttctgcgcgtaatctgctgctatttaaattacgtacacgtgttattactttgttaacgacaattgtcttaattaactgggcctcatgggccttccgctcactgcccgctttccagtcgggaaacctgtcgtgccagctctgcagatgacggtgaaaacctctgacacatgcagctcccggagacggtcacagcttgtctgtaagcggatgccgggagcagacaagcccgtcagggcgcgtcagcgggtgttggcgggtgtcggggcgcagccatgacccagtcacgtagcgatagcggagtgtatactggcttaactatgcggcatcagagcagattgtactgagagtgcaccatatgcggtgtgaaataccgcacagatgcgtaaggagaaaataccgcatcaggcgctcttccgcttcctcgctcactgactcgctgcgctcggtcgttcggctgcggcgagcggtatcagctcactcaaaggcggtaatacggttatccacagaatcaggggataacgcaggaaagaacatgtgagcaaaaggccagcaaaaggccaggaaccgtaaaaaggccgcgttgctggcgtttttccataggctccgcccccctgacgagcatcacaaaaatcgacgctcaagtcagaggtggcgaaacccgacaggactataaagataccaggcgtttccccctggaagctccctcgtgcgctctcctgttccgaccctgccgcttaccggatacctgtccgcctttctcccttcgggaagcgtggcgctttctcatagctcacgctgtaggtatctcagttcggtgtaggtcgttcgctccaagctgggctgtgtgcacgaaccccccgttcagcccgaccgctgcgccttatccggtaactatcgtcttgagtccaacccggtaagacacgacttatcgccactggcagcagccactggtaacaggattagcagagcgaggtatgtaggcggtgctacagagttcttgaagtggtggcctaactacggctacactagaaggacagtatttggtatctgcgctctgctgaagccagttaccttcggaaaaagagttggtagctcttgatccggcaaacaaaccaccgctggtagcggtggtttttttgtttgcaagcagcagattacgcgcagaaaaaaaggatctcaagaagatcctttgatcttttctactgcagaagcttgttagacaccctgtcatgtattttatattatttatttcaccatacggattaagtgaaacctaatgaaaatagtactttcggagctttaactttaatgaaggtatgtttttttatagacatcgatgtctggtttaacaataggaaaaagtagctaaaactcccatgaattaaagaaataacaaggtgtctaacaacctgttattaagaatgttagaaaagacttaacatttgtgttgagtttttatagacattggtgtctagacatacggtagataaggtttgctcaaaaataaaataaaaaaagattggactaaaaaacatttaatttagtacaatttaattagttattttttcgtctcaaattttgctttgttgagcagaaatttagataaaaaaatccccgtgatcagattacaatgtcgttcattgtacgatgtgtcgaaaaatctttacgacactctaaactgaccacacgggggaaaaagaaaactgaactaataacatcatgatactcggaaaacctagcaattctcaacccctaaacaaaagaaacttccaaaaccctgaccatataaaggagtggcaacaatcagcaatcagtcaagatttgatagcagaaaatcttgtatcggttgctaatggttttgatgtactatttatcggcaataaataccgaactaacacgggtgttctgtcacggcacatattaaactcctattctcatttagaagatggtggttcgtatggtagaacatttgacccatttaccaataaagaaatgcagtgggttcaatttaaaccgaatagaccaagaaaaggttctactggtaaggtaatcaaatatgaatcgccaaaaggtgaacctacaagagttctaatgccgtttgtgcctatgaaaatatggcaacggattagcgataagttcggagtaccgattaatccgaaaaaagatactcacttttgggaatgggtaaagaataatccatcgataccgattgccattacagaaggaaataaaaaagctaattgcctattatcctatggctatcctgctattgcctttgtaggcatttggaacggattagagaaaataaatgatttctcgaaggaaaagcagttaaaagaggatttgaaatggttgttatccaacggcaaccgaaatattaatatcatctttgaccaagaccagaaacaaaaaactgtaattaatgtaaacaaagctattttcgctttatcttctctaataagtagaaatggtcataaagttaatattgtgcaatggttgccgtcaaaaggtaaaggaatagatgattatttggtagctttaccttttgagaaaagagaaaatcatttagacaacttaattaaaattgcaccatcatttaatttttggtcaactaaatacttattcaagtgtcgtaaaccagatttaaccgtaaattgccgttatttgagcgatgcagtaaaagaattacctcaagaggatatagcattaatagcacctcacggcacgggtaaaacttcattagtagctactcacgttaagaatcggagttatcacggaaggaaaactatttcattggtgcatcttgaaagtttagccaaagctaatggcaacgcacttggattatattaccgaaccgaaaataatattgaaaagcaatatcttggatttagcttatgtgtagatagttgccgtgataagattaacggcattacaactgatattatttcaggtcaagattattgccttttcattgatgaaattgaccaagtaattccacacatccttaacagtgaaactgaagtaagtaagtatagatgcaccatcattgacactttttctgaactggtgagaaatgctgaacaggtcattattgctgatgctgatttatccgatgtgacgattgacctaatagaaaacatcagaggtaaaaaactatatgtaatcaagaatgaatatcagtatcagggaatgacttttaacgccgttggttcaccattagaaatgatggcaatgatgggaaaatcggtgtcagaaggcaagaaattatttattaacaccacatcccaaaaggcaaaaagtaagtacggcacaatcgctcttgagtcttatatttttggtctaaataaagaagcaaagatattaagaatagactctgaaaccactaaaaaccctgaacatccagcctataaaatcattgaccaagacttaaataatatcctcaaagattatgattatgtcattgcctcaccttgccttcaaacaggtgtcagtattaccttaaaagggcattttgaccagcaatttaacttttccagtggaaacattacacctcattgctttttacagcaaatgtggcggttgagggatgcagaaattgaaagattctattatgtgccgaactcatctaacctcaatctcattgggaataagtcaagttcaccatcagaccttctaaagagcaataacaagatggcaacggcaacggttaaccttttgggtagaatcgactccgaatattccctagagtatgaatcgcacggcatttggcttgagacgtgggcaaaattatcagcacggcataacagttcaatgcgttgttactctgaaattcttacctatctaattacgtctcaagggcataaattaaatatcaacattccctcacctcttgcagatattaagaagctaaatgatgaggtaagtagtaacagggaaaaggtaaaaaatgagagatactctcagaggttaaactcaccagatattaacgatgcagaagctaccatactcgaatctaaagagcaaaaaatcggattgactctcaatgagagatgcaccctagaaaagcataaagttaagaagcggtatgggaatgtaaagatggatattctcacctttgatgatgatggactataccccaaactcagactattttattacctcaccatcggtaaacctcatctcaaggctaatgacagaaaagctattgccaaaatgggcaatgacaataaaggcaagattctatcaaaagacttagttaataaaacttactccgctcgtgtgaaggtcttagagattcttaaactaactgactttatcgacaatcttagagatgaactcttaataactcccaataatccagctatcaccgattttaataatcttctgctaagagctaagaaggatttaagagtattaggagtcaacatcggaaaatatccaatggccaacattaatgccgtacttactctcattggtcacaaactttctgtaatgagagatgagttcggaaaagagaaaaggataaaagtagatggtaaatcataccgatgttatcaacttgaaacattaccagattttaccaatgatactcttgactactggttagaaaatgatagccaaaaagaagtaacagcaacagaaaattactccgaaaattttaacccttcaaatagctacaatccagacagtaagacactttcagagggtgcaaatttcctatatataaataaagaagaattgcatccaaataaattgcacctagaaataaaagaaggtgctgaactttttttattcggggtaaaggtgattgtgaaaggaatcttggacggggcagtaactatattctctatgggtcaagaatacgatttatccctcaatgaactagaggggatgttaacatcatgaactttacaagaatctttttaaagggcgatcgcaccatgttaaatgatggtacatttgttcagatatttgatatttaccatgaccacgcattgggagtgacccttgaccttaagacagaaaaaattatttccgatgatgttagggtaattactgtcaaagacttattgttcgatggcacttataaaggggtaaaatcttttatgcccgataatgcccgataatgcccgattgatgctacaaaatcccataatcataagcgataatcccctaatagcttgtaattcttgaaccgtagcgattttagagtattccaaaaagaagaaataaacaccgcaaaatgtcgtatttcacatatataaaccaaggttttttgccctaaaatctttatgtttgtagtgtgatgttgggtcaaaatggtcagaaaagttgcaaggtttttatggatgcttacgcgcgcgaggggtaagcatccccaaatagttactttatcctagtccatgcccatttattgccgtcccgttcggctttaaaaaagtgccaaaactcacaaggtgcaataaaaagttctgtacctttcgcaaccctagataatctttcaacagttactttttttcctattatctcggtacaaagtttggctagtttctcttttccctctttttcaatcaagccttcttgtatgcccaactcattgattaatctctctatttttaccattatttcccgttcaggtagtttatcccctaaatcttcatcggggggcaatgtagggcattctgaaggggctttttcttctgtctggacattatctaatattgaagtaaccaaactatcttcagttttttctattcctattaattcatattcggttactgtatccgtatcaatatccgaataactatctttatccgtattagctattcggttaagtttatccgttaactcagaaacaagactatatagcggttttagcttttcttctatcctgttatctaatacggataagtttatacggttatcattatccgtattagtatcattgggcttttttggtagttctaccccctcataaaccgcttttattcccaattccaacagactgataacagtatcctttataatgggttttttgctgatatggtgaacttttgccccttccatcattgcgatactttctatctcactcatcaacttatcgcttaagtgaatctcgtatctgtttaatcccttactggttttattcatatccgtttactttattcggttaacaattctattttatacgaataaaatattatacggttaactttatacgtttaactattttatctatacggataacagtaataagttattcgtattagttatacgtttacttttatccaaataaaattagtgcatttaaactaaaagaatgattttatcggagttgatagcattggattaacctaaagatgtttataagctatatctgataagtatttaaggttattttgttattctgtttattgacattatcagaataaaagaatagaatataattgttgagagataagaggtttaagtgattatggttaagaagttagttggttatgtcagggtcagtagtgaatcgcaagaggataacactagcttacagaatcagatagagagaattgaagcatattgtatggcttttggttatgagttggtaaaaatattcaaagaggttgccactggtacaaaagcagatattgaaacccgtcctatttttaatgaagctatagaatacttgaaacaggataatgctaatggaattattgccttgaagctagaccgaatcgcacggaatgctttagatgtattgcgtttggttcgtgaaaccttagaaccacaaaataaaatgttagtgttactagatattcaggtagatacttcgacaccttcaggaaaaatgattttaactgtaatgagtgccgttgctgaactcgaaagagacatgatctatgatcgcactcaggggggtagaaagactaaagcccaaaagggcgggtatgcctacgggaaacctaaatttggctataagactgaagaaaaggaactaaaagaagattcagcacaacaggaaactattaaactaattaagagacaccgtaggtcagggaaaagctaccagaaaatagctgattatctcaatgcccaaagtattcccactaaacaaggtaagaaatggagttctagcgtcgtctatcgaatctgtcaggaaaaagctggttaagtctgtttatagatatttagaatttattgaataaaaatagtatgaacaataaatatttatggactaaccacgctcggaaacgtttaactgaacgatgggaaataaaagaatcatgggttattgataccatcgaaaatcctgaacgttcagaatttattgttgatgagtcaggggaaaaatatcattactataaaagaatagctaagtttaagaatagagtgttagaagtgataacttctgccaactcaacacccacaagaataataaccttttactttaaccgtaacatgaggaaaaatttatgattgttacttacgataatgaagttgacgcaatttattttaagttaacggaaaataaaattgatagcaccgaacctcaaacagacaggattatcattgattacgatgaaagtaataatattgttggcattgaggtattagattttaattatcttgtcaagaaaggtttaaccgttgctgatttacctttttctgaagatgaaagattaacagcttctcaatattttaattttcctgttgctatctaatccagaaggggcaataatccccttctttcatcgagttagacttaatatcacaaaagtcattttcattttaccgtttcttttccacagcgtccgtacgcccctcgttaaatctcaaaaccgacaatttatgatgtttataaaaagttactcactttaataagtatttatactcattaaagggttattctttttttgtagcctgataggttgggaaggaatatttcagattatcagatttgttgaatatttttcgtcagatacgcaaaccttacaaacataattaacaactgaaactattgatatgtctaggttttagctctatcacaggttggatctg

SEQ ID NO: 101 - DNA, 13071 bp, Cyanobacterium sp. ABICyano1
tcgacaattaataacttcttcctgtacgggcgaatggccatttgctcctaactaactccgtactgctttgcggaacgagcgtagcgaactctccgaattactaagccttcatccctgatagatgcaaaaaacgaattaaaattatgtgtaaaaagaaaatgtgtctttatttagtagtcaaagttacaaaatattaagaatcaaattaataatgtattgggcagttaagtatataagtctttaaatatttatttgtattcaatatattaaggaggatcagccttatgaattcttacactgttggaacctatttagcagaacgtttagttcaaattggtctcaaacaccattttgcagtagctggtgattataatttagttttattggataacttattgttaaataagaatatggaacaagtgtattgttgtaatgaattaaactgtggtttttctgctgagggatatgctcgtgcaaaaggtgctgccgcagcagttgttacttattctgttggagcattaagtgcttttgacgctattggaggtgcttatgcagaaaatttacctgtaatcttaatctctggtgcacccaataacaacgatcacgctgctggtcatgtattgcatcatgctttaggtaaaaccgattatcattaccaattagaaatggcaaaaaatattaccgctgccgcagaagctatttatactcccgaagaagcacctgctaagatcgatcacgtaattaaaaccgctctccgtgagaaaaaacccgtatatttagaaatcgcttgcaatatcgcttctatgccttgtgcagctcctggacctgctagtgctttatttaacgatgaagcatctgatgaggctagtttaaatgccgctgttgaagaaactttgaaatttattgctaatcgtgataaagtagctgttttagttggttctaaactccgtgccgctggtgcagaagaagcggctgtaaaattcgcagatgccttaggaggtgctgttgccacaatggcagccgctaaaagttttttccccgaagaaaatcctcattacattggtacttcttggggtgaggtatcttaccctggtgtagaaaaaaccatgaaggaagctgatgcagtaattgcattagctcctgttttcaatgattactctaccactggttggactgatattccagaccccaaaaaattagttttagcagaacctcgctctgtagttgtgaatggtgttagatttcccagtgtacatctcaaagattatttaactcgtttagctcaaaaagtgagtaaaaagactggcgcactcgatttctttaaatctttaaatgctggtgaattaaagaaagcagctcctgctgatcccagtgctcctttagtgaatgccgaaatcgcaagacaagttgaagccttgttaactcctaacactaccgttattgccgagactggtgatagttggttcaatgctcaacgcatgaaattacccaatggtgctcgtgttgagtatgaaatgcaatggggtcacattggatggtctgttcctgctgcatttggatatgcagttggagcacctgagcgtagaaacattttaatggtaggtgatggttctttccaactcactgctcaagaagttgcacaaatggtacgtttaaaattgcctgttattatctttctcattaacaactatggttacaccattgaagttatgattcatgatggtccttataataacattaagaattgggattacgcaggtttaatggaggtatttaacggtaatggtggatacgacagtggagcaggtaaaggattaaaagctaaaacaggaggtgagttagctgaagcaattaaagtagctttagccaatacagatggtcctaccttaatcgaatgtttcattggacgtgaagattgtactgaagagttagttaaatggggaaagcgtgttgccgctgcaaattctcgtaaacctgtaaacaaactcttgtagttaggatccagcaaggtttcatcccgaccccctcagggtcgggatttttttattgtgagctcaactttagatattcgtagttggcaatgtcgtaaatgcggaacaatacatggaaaacatatagatttgtaatgagaaaaagtgtaaacaaatattaagaaaaagatcagaaaaatttaacaacacgtaataaaaaaatgcgtcactacgggttataaatttacatgaaaggttaaaacacttttctgagacgattttgataaaaaagttgtcaaaaaattaagtttctttacaaatgcttaacaaaaacttggttttaagcacaaaataagagagactaatttgcagaagttttacaaggaaatcttgaagaaaaagatctaagtaaaacgactctgtttaaccaaaatttaacaaatttaacaaaacaaactaaatctattaggagattaactacatatgcctatgatcaaagccttcgcagttcatgagtctgatggagatttacagccttttgaatatgatcctggtgcattattatctgatcaagttgagatcgaagttaaatattgtggaatttgtcattctgatttatctatgatctctaatgaatggggtatgacccaataccctttagtacctggacatgaggtagtaggtgcaatcgccaaagtaggtgaaaatgttaaaaatttatctgttggtcaaattgtaggattaggttggcacgcaggttattgtaacgaatgtcctcaatgtactactggtgatcaaaatttatgtgctactgctcaaggaactattgtaggacatcatggaggtttcgctgaaaaagttcgcgctgctgcaaattctgtagttcccatccctgaaggaatcgatttagaagctgctggacctttattttgtggaggtatcaccgtttttaatcctttagtacaatatggaatccaacccactgcaaaagttgctgtaattggaattggaggtttaggtcacatggctgttcaattcttaaacgcttggggttgtgaagttaccgcttttaccagttctgaagcaaaaatcactgaggctttagaattaggtgctcatcacactttaaacagtcgtgaccctgaagccatcgcagccgctgctggacagtttgatttaatcatttctaccgttaacgttaaattagattggaatgcctatttaagtactttaaaacctcacggtcgtttacacttcgtaggtgctactttagatcccttagacattaacgtttttgctttaatcatgcagcaacgttctatctctggtagtcctgttggatctcctgcaaccatcgcaaaaatgttagaatttgcaaaattacataaaattcaacctaaaattgaaacctttaaatttgaagatgttaaccaggctattgcacgtttaaaaagtggtgaagcccactatcgtattgtattatgtagataactagatctacttctaaactgaaacaaatttgagggtaggcttcattgtctgcccttatttttttatttaggaaaagtgaacagactaaagagtgttggctctattgctttgagtatgtaaattaggcgttgctgaattaaggtatgatttttgacccctgcaggatcatcttgctgaaaaactcgagcgctcgttccgcaaagcggtacggagttagttaggggctaatgggcattctcccgtacaggaaagagttagaagttattaattatcaacaattctcctttgcctagtgcatcgttacctttttaattaaaacataaggaaaactaataatcgtaataatttaacctcaaagtgtaaagaaatgtgaaattctgacttttataacgttaaagagggaaaaattagcagtttaaaatacctagagaatagtctggggtaagcatagagaattagattagttaagttaatcaaattcagaaaaaataataatcgtaaatagttaatctgggtgtatagaaaatgatccccttcatgataagatttaaactcgaaaagcaaaagccaaaaaactaacttccattaaaagaagttgttacatataacgctataaagaaaatttatatatttggaggataccaaccatgtctcatattcaacgtgaaactagttgttctcgccctcgtttaaattctaatatggatgccgatttatatggttataaatgggctcgtgataatgttggtcaatctggtgctactatttatcgtttatatggtaaacctgatgctcctgaattattcttgaaacatggtaaaggttctgttgctaatgatgttactgatgaaatggttcgtttaaactggttgactgaatttatgcctttacctactattaaacattttattcgtactcccgatgatgcttggttattaactactgctattcctggtaaaactgcttttcaagttttagaagaatatcctgattctggtgaaaatattgttgatgctttagctgtttttttacgtcgtttacattctattcccgtttgtaattgtccttttaattctgatcgtgtttttcgtttagctcaagctcaatctcgtatgaataatggtttagttgatgcttctgattttgatgatgaacgtaatggttggcctgttgaacaagtttggaaagaaatgcacaaattgttacctttttctcctgattctgttgttactcatggtgatttttctttagataatttgatctttgatgaaggtaaattgattggttgtattgatgttggtcgtgttggtattgctgatcgttatcaagatttagctattttatggaattgtttaggtgaattttctccttctttacagaaacgtttatttcagaaatatggtattgataatcctgatatgaacaagttacaatttcatttaatgttggacgagttcttttaagaattaattcatgaccaaaatcccttaacgtgagttttcgttccactgagcgtcagaccccgtagaaaagatcaaaggatcttcttgagatcctttttttctgcgcgtaatctgctgctatttaaattacgtacacgtgttattactttgttaacgacaattgtcttaattaactgggcctcatgggccttccgctcactgcccgctttccagtcgggaaacctgtcgtgccagctctgcagatgacggtgaaaacctctgacacatgcagctcccggagacggtcacagcttgtctgtaagcggatgccgggagcagacaagcccgtcagggcgcgtcagcgggtgttggcgggtgtcggggcgcagccatgacccagtcacgtagcgatagcggagtgtatactggcttaactatgcggcatcagagcagattgtactgagagtgcaccatatgcggtgtgaaataccgcacagatgcgtaaggagaaaataccgcatcaggcgctcttccgcttcctcgctcactgactcgctgcgctcggtcgttcggctgcggcgagcggtatcagctcactcaaaggcggtaatacggttatccacagaatcaggggataacgcaggaaagaacatgtgagcaaaaggccagcaaaaggccaggaaccgtaaaaaggccgcgttgctggcgtttttccataggctccgcccccctgacgagcatcacaaaaatcgacgctcaagtcagaggtggcgaaacccgacaggactataaagataccaggcgtttccccctggaagctccctcgtgcgctctcctgttccgaccctgccgcttaccggatacctgtccgcctttctcccttcgggaagcgtggcgctttctcatagctcacgctgtaggtatctcagttcggtgtaggtcgttcgctccaagctgggctgtgtgcacgaaccccccgttcagcccgaccgctgcgccttatccggtaactatcgtcttgagtccaacccggtaagacacgacttatcgccactggcagcagccactggtaacaggattagcagagcgaggtatgtaggcggtgctacagagttcttgaagtggtggcctaactacggctacactagaaggacagtatttggtatctgcgctctgctgaagccagttaccttcggaaaaagagttggtagctcttgatccggcaaacaaaccaccgctggtagcggtggtttttttgtttgcaagcagcagattacgcgcagaaaaaaaggatctcaagaagatcctttgatcttttctactgcagaagcttgttagacaccctgtcatgtattttatattatttatttcaccatacggattaagtgaaacctaatgaaaatagtactttcggagctttaactttaatgaaggtatgtttttttatagacatcgatgtctggtttaacaataggaaaaagtagctaaaactcccatgaattaaagaaataacaaggtgtctaacaacctgttattaagaatgttagaaaagacttaacatttgtgttgagtttttatagacattggtgtctagacatacggtagataaggtttgctcaaaaataaaataaaaaaagattggactaaaaaacatttaatttagtacaatttaattagttattttttcgtctcaaattttgctttgttgagcagaaatttagataaaaaaatccccgtgatcagattacaatgtcgttcattgtacgatgtgtcgaaaaatctttacgacactctaaactgaccacacgggggaaaaagaaaactgaactaataacatcatgatactcggaaaacctagcaattctcaacccctaaacaaaagaaacttccaaaaccctgaccatataaaggagtggcaacaatcagcaatcagtcaagatttgatagcagaaaatcttgtatcggttgctaatggttttgatgtactatttatcggcaataaataccgaactaacacgggtgttctgtcacggcacatattaaactcctattctcatttagaagatggtggttcgtatggtagaacatttgacccatttaccaataaagaaatgcagtgggttcaatttaaaccgaatagaccaagaaaaggttctactggtaaggtaatcaaatatgaatcgccaaaaggtgaacctacaagagttctaatgccgtttgtgcctatgaaaatatggcaacggattagcgataagttcggagtaccgattaatccgaaaaaagatactcacttttgggaatgggtaaagaataatccatcgataccgattgccattacagaaggaaataaaaaagctaattgcctattatcctatggctatcctgctattgcctttgtaggcatttggaacggattagagaaaataaatgatttctcgaaggaaaagcagttaaaagaggatttgaaatggttgttatccaacggcaaccgaaatattaatatcatctttgaccaagaccagaaacaaaaaactgtaattaatgtaaacaaagctattttcgctttatcttctctaataagtagaaatggtcataaagttaatattgtgcaatggttgccgtcaaaaggtaaaggaatagatgattatttggtagctttaccttttgagaaaagagaaaatcatttagacaacttaattaaaattgcaccatcatttaatttttggtcaactaaatacttattcaagtgtcgtaaaccagatttaaccgtaaattgccgttatttgagcgatgcagtaaaagaattacctcaagaggatatagcattaatagcacctcacggcacgggtaaaacttcattagtagctactcacgttaagaatcggagttatcacggaaggaaaactatttcattggtgcatcttgaaagtttagccaaagctaatggcaacgcacttggattatattaccgaaccgaaaataatattgaaaagcaatatcttggatttagcttatgtgtagatagttgccgtgataagattaacggcattacaactgatattatttcaggtcaagattattgccttttcattgatgaaattgaccaagtaattccacacatccttaacagtgaaactgaagtaagtaagtatagatgcaccatcattgacactttttctgaactggtgagaaatgctgaacaggtcattattgctgatgctgatttatccgatgtgacgattgacctaatagaaaacatcagaggtaaaaaactatatgtaatcaagaatgaatatcagtatcagggaatgacttttaacgccgttggttcaccattagaaatgatggcaatgatgggaaaatcggtgtcagaaggcaagaaattatttattaacaccacatcccaaaaggcaaaaagtaagtacggcacaatcgctcttgagtcttatatttttggtctaaataaagaagcaaagatattaagaatagactctgaaaccactaaaaaccctgaacatccagcctataaaatcattgaccaagacttaaataatatcctcaaagattatgattatgtcattgcctcaccttgccttcaaacaggtgtcagtattaccttaaaagggcattttgaccagcaatttaacttttccagtggaaacattacacctcattgctttttacagcaaatgtggcggttgagggatgcagaaattgaaagattctattatgtgccgaactcatctaacctcaatctcattgggaataagtcaagttcaccatcagaccttctaaagagcaataacaagatggcaacggcaacggttaaccttttgggtagaatcgactccgaatattccctagagtatgaatcgcacggcatttggcttgagacgtgggcaaaattatcagcacggcataacagttcaatgcgttgttactctgaaattcttacctatctaattacgtctcaagggcataaattaaatatcaacattccctcacctcttgcagatattaagaagctaaatgatgaggtaagtagtaacagggaaaaggtaaaaaatgagagatactctcagaggttaaactcaccagatattaacgatgcagaagctaccatactcgaatctaaagagcaaaaaatcggattgactctcaatgagagatgcaccctagaaaagcataaagttaagaagcggtatgggaatgtaaagatggatattctcacctttgatgatgatggactataccccaaactcagactattttattacctcaccatcggtaaacctcatctcaaggctaatgacagaaaagctattgccaaaatgggcaatgacaataaaggcaagattctatcaaaagacttagttaataaaacttactccgctcgtgtgaaggtcttagagattcttaaactaactgactttatcgacaatcttagagatgaactcttaataactcccaataatccagctatcaccgattttaataatcttctgctaagagctaagaaggatttaagagtattaggagtcaacatcggaaaatatccaatggccaacattaatgccgtacttactctcattggtcacaaactttctgtaatgagagatgagttcggaaaagagaaaaggataaaagtagatggtaaatcataccgatgttatcaacttgaaacattaccagattttaccaatgatactcttgactactggttagaaaatgatagccaaaaagaagtaacagcaacagaaaattactccgaaaattttaacccttcaaatagctacaatccagacagtaagacactttcagagggtgcaaatttcctatatataaataaagaagaattgcatccaaataaattgcacctagaaataaaagaaggtgctgaactttttttattcggggtaaaggtgattgtgaaaggaatcttggacggggcagtaactatattctctatgggtcaagaatacgatttatccctcaatgaactagaggggatgttaacatcatgaactttacaagaatctttttaaagggcgatcgcaccatgttaaatgatggtacatttgttcagatatttgatatttaccatgaccacgcattgggagtgacccttgaccttaagacagaaaaaattatttccgatgatgttagggtaattactgtcaaagacttattgttcgatggcacttataaaggggtaaaatcttttatgcccgataatgcccgataatgcccgattgatgctacaaaatcccataatcataagcgataatcccctaatagcttgtaattcttgaaccgtagcgattttagagtattccaaaaagaagaaataaacaccgcaaaatgtcgtatttcacatatataaaccaaggttttttgccctaaaatctttatgtttgtagtgtgatgttgggtcaaaatggtcagaaaagttgcaaggtttttatggatgcttacgcgcgcgaggggtaagcatccccaaatagttactttatcctagtccatgcccatttattgccgtcccgttcggctttaaaaaagtgccaaaactcacaaggtgcaataaaaagttctgtacctttcgcaaccctagataatctttcaacagttactttttttcctattatctcggtacaaagtttggctagtttctcttttccctctttttcaatcaagccttcttgtatgcccaactcattgattaatctctctatttttaccattatttcccgttcaggtagtttatcccctaaatcttcatcggggggcaatgtagggcattctgaaggggctttttcttctgtctggacattatctaatattgaagtaaccaaactatcttcagttttttctattcctattaattcatattcggttactgtatccgtatcaatatccgaataactatctttatccgtattagctattcggttaagtttatccgttaactcagaaacaagactatatagcggttttagcttttcttctatcctgttatctaatacggataagtttatacggttatcattatccgtattagtatcattgggcttttttggtagttctaccccctcataaaccgcttttattcccaattccaacagactgataacagtatcctttataatgggttttttgctgatatggtgaacttttgccccttccatcattgcgatactttctatctcactcatcaacttatcgcttaagtgaatctcgtatctgtttaatcccttactggttttattcatatccgtttactttattcggttaacaattctattttatacgaataaaatattatacggttaactttatacgtttaactattttatctatacggataacagtaataagttattcgtattagttatacgtttacttttatccaaataaaattagtgcatttaaactaaaagaatgattttatcggagttgatagcattggattaacctaaagatgtttataagctatatctgataagtatttaaggttattttgttattctgtttattgacattatcagaataaaagaatagaatataattgttgagagataagaggtttaagtgattatggttaagaagttagttggttatgtcagggtcagtagtgaatcgcaagaggataacactagcttacagaatcagatagagagaattgaagcatattgtatggcttttggttatgagttggtaaaaatattcaaagaggttgccactggtacaaaagcagatattgaaacccgtcctatttttaatgaagctatagaatacttgaaacaggataatgctaatggaattattgccttgaagctagaccgaatcgcacggaatgctttagatgtattgcgtttggttcgtgaaaccttagaaccacaaaataaaatgttagtgttactagatattcaggtagatacttcgacaccttcaggaaaaatgattttaactgtaatgagtgccgttgctgaactcgaaagagacatgatctatgatcgcactcaggggggtagaaagactaaagcccaaaagggcgggtatgcctacgggaaacctaaatttggctataagactgaagaaaaggaactaaaagaagattcagcacaacaggaaactattaaactaattaagagacaccgtaggtcagggaaaagctaccagaaaatagctgattatctcaatgcccaaagtattcccactaaacaaggtaagaaatggagttctagcgtcgtctatcgaatctgtcaggaaaaagctggttaagtctgtttatagatatttagaatttattgaataaaaatagtatgaacaataaatatttatggactaaccacgctcggaaacgtttaactgaacgatgggaaataaaagaatcatgggttattgataccatcgaaaatcctgaacgttcagaatttattgttgatgagtcaggggaaaaatatcattactataaaagaatagctaagtttaagaatagagtgttagaagtgataacttctgccaactcaacacccacaagaataataaccttttactttaaccgtaacatgaggaaaaatttatgattgttacttacgataatgaagttgacgcaatttattttaagttaacggaaaataaaattgatagcaccgaacctcaaacagacaggattatcattgattacgatgaaagtaataatattgttggcattgaggtattagattttaattatcttgtcaagaaaggtttaaccgttgctgatttacctttttctgaagatgaaagattaacagcttctcaatattttaattttcctgttgctatctaatccagaaggggcaataatccccttctttcatcgagttagacttaatatcacaaaagtcattttcattttaccgtttcttttccacagcgtccgtacgcccctcgttaaatctcaaaaccgacaatttatgatgtttataaaaagttactcactttaataagtatttatactcattaaagggttattctttttttgtagcctgataggttgggaaggaatatttcagattatcagatttgttgaatatttttcgtcagatacgcaaaccttacaaacataattaacaactgaaactattgatatgtctaggttttagctctatcacaggttggatctg

SEQ ID NO: 102 - DNA, 13064 bp, Cyanobacterium sp. ABICyano1
tcgacaattaataacttcttcctgtacgggcgaatggccatttgctcctaactaactccgtactgctttgcggaacgagcgtagcgaactctccgaattactaagccttcatccctgatagatgcaaaaaacgaattaaaattatgtgtaaaaagaaaatgtgtctttatttagtagtcaaagttacaaaatattaagaatcaaattaataatgtattgggcagttaagtatataagtctttaaatatttatttgtattcaatatattaaggaggatcagccttatgaattcttataccgtgggtacttatttagccgaacgcttagtgcaaattggtttaaaacatcattttgccgtggctggggactataatttagtgttattggataacttattattaaataaaaacatggaacaagtgtattgttgtaatgaattaaattgtggtttttctgctgaaggttatgctagagctaaaggtgcagctgctgctgttgttacttattctgtgggtgctttatctgcttttgatgctattggtggtgcttatgccgaaaatttacccgtgattttaatttctggtgcccctaataataatgatcatgccgctggacatgttttacatcatgccttaggtaaaaccgattatcattatcaattagaaatggccaaaaatattactgctgctgccgaagctatttatactcctgaagaagcccctgccaaaattgatcatgtgattaaaaccgccttacgcgaaaaaaaacccgtgtatttagaaattgcctgtaatattgcttctatgccttgtgctgctcctgggcctgcttctgctttatttaatgatgaagcctctgatgaagctagtttaaatgctgccgtggaagaaaccttaaaatttattgccaatcgcgataaagttgccgtgttagttggttctaaattaagagctgctggtgctgaagaagctgctgttaaatttgctgatgctttaggtggtgcagttgctactatggctgctgccaaatctttttttcccgaagaaaatccccattatattggaactagttggggagaagtttcttatcctggtgtggaaaaaactatgaaagaagccgacgctgttattgctttagcccctgtgtttaatgattattctaccactggttggactgatattcccgatcccaaaaaattagttttagccgaacctcgttctgttgttgttaatggtgttcgctttccctctgtgcatttaaaagattatttaacccgcttagcccaaaaagtttctaaaaaaactggtgccttagatttttttaaatctttaaatgcgggtgaattaaaaaaagctgctcctgctgatccttctgctcctttagttaatgctgaaattgcccgtcaagttgaagccttattaacccctaatactaccgttattgccgaaactggtgattcttggtttaatgcccaacgcatgaaattacctaatggtgcccgtgttgaatatgaaatgcaatggggtcatattggttggtctgtacctgctgcttttggttatgctgttggtgctcctgaacgtcgtaatattttaatggtgggtgatggttcttttcaattaactgcccaagaagttgcccaaatggttcgcttaaaattacccgttattatttttttaataaataattatggttataccattgaagtgatgattcatgatgggccatataataatattaaaaattgggattatgcgggtttaatggaagtgtttaatggtaatggtggttatgattctggtgctggtaaaggtttaaaagccaaaactggtggtgaattagctgaagctattaaagttgccttagccaatactgatgggccaaccttaattgaatgttttattggtcgcgaagattgtaccgaagaattagttaaatggggtaaacgtgttgctgctgctaattctcgcaaacccgtgaataaattattgtaaggatccagcaagtttcatcccgaccccctcagggtcgggatttttttattgtgagctcaactttagatattcgtagttggcaatgtcgtaaatgcggaacaatacatggaaaacatatagatttgtaatgagaaaaagtgtaaacaaatattaagaaaaagatcagaaaaatttaacaacacgtaataaaaaaatgcgtcactacgggttataaatttacatgaaaggttaaaacacttttctgagacgattttgataaaaaagttgtcaaaaaattaagtttctttacaaatgcttaacaaaaacttggttttaagcacaaaataagagagactaatttgcagaagttttacaaggaaatcttgaagaaaaagatctaagtaaaacgactctgtttaaccaaaatttaacaaatttaacaaaacaaactaaatctattaggagattaactacatatgatccgtgcttatgcagctcaggagaaaggaggtaaattagaaccctttgattatgaccctggtattttagcagacgaagacgttgagattgctgttgagtactgtggaatttgtcattccgatttatctatgctcgataatgactggggtttaactacttaccctttcgttcccggtcacgaggttgtaggaaccattgctgcattaggagccaaagtaaaagaactcaaattgggtcagcgtgtaggattaggatggttcagtcgttcttgttctacctgtgagacttgtatgtctggtgatcaaaatttatgtgcaaccgctgaaggtactattgtaggaagacatggtggatttgctgagcgtgttcgtgctcaccattcttggttagtacctttacccgatcaattagacgcagctaaagccggtcctttattttgtggtggtatcactgtatttaatcctatcgttcagttcaacatcaaacctaccgcacgtgtaggtgttatcggaatcggaggtttaggtcacattgctctcaaatttttaaaagcatggggttgtgaggtaactgcctttagttcttctcctgacaaagaaaccgaagctaaagagttaggtgcaacccattttattaactctcgtgatcctgaagcattacaaagtgttcagaactatttcgactttattattagtactgtaaatgtaaacttagattggggattatacattgcttgtttacgtcctaaaggaagattacacattgtaggtgcagtattagagcctatggctacttatgcattccctttaatcatgggacagaaatctattagtggatctcccttaggatctcctagtactgtttctaaaatgatcgagtttgcttcccgtcatggtatcgagcccgttaccgaaacttaccccatttctcgtgttaacgaagcaatggagaaattaagaactggtcagcccaaatacagattggttctccaaattaaataactagatctacttctaaactgaaacaaatttgagggtaggcttcattgtctgcccttatttttttatttaggaaaagtgaacagactaaagagtgttggctctattgctttgagtatgtaaattaggcgttgctgaattaaggtatgatttttgacccctgcaggatcatcttgctgaaaaactcgagcgctcgttccgcaaagcggtacggagttagttaggggctaatgggcattctcccgtacaggaaagagttagaagttattaattatcaacaattctcctttgcctagtgcatcgttacctttttaattaaaacataaggaaaactaataatcgtaataatttaacctcaaagtgtaaagaaatgtgaaattctgacttttataacgttaaagagggaaaaattagcagtttaaaatacctagagaatagtctggggtaagcatagagaattagattagttaagttaatcaaattcagaaaaaataataatcgtaaatagttaatctgggtgtatagaaaatgatccccttcatgataagatttaaactcgaaaagcaaaagccaaaaaactaacttccattaaaagaagttgttacatataacgctataaagaaaatttatatatttggaggataccaaccatgtctcatattcaacgtgaaactagttgttctcgccctcgtttaaattctaatatggatgccgatttatatggttataaatgggctcgtgataatgttggtcaatctggtgctactatttatcgtttatatggtaaacctgatgctcctgaattattcttgaaacatggtaaaggttctgttgctaatgatgttactgatgaaatggttcgtttaaactggttgactgaatttatgcctttacctactattaaacattttattcgtactcccgatgatgcttggttattaactactgctattcctggtaaaactgcttttcaagttttagaagaatatcctgattctggtgaaaatattgttgatgctttagctgtttttttacgtcgtttacattctattcccgtttgtaattgtccttttaattctgatcgtgtttttcgtttagctcaagctcaatctcgtatgaataatggtttagttgatgcttctgattttgatgatgaacgtaatggttggcctgttgaacaagtttggaaagaaatgcacaaattgttacctttttctcctgattctgttgttactcatggtgatttttctttagataatttgatctttgatgaaggtaaattgattggttgtattgatgttggtcgtgttggtattgctgatcgttatcaagatttagctattttatggaattgtttaggtgaattttctccttctttacagaaacgtttatttcagaaatatggtattgataatcctgatatgaacaagttacaatttcatttaatgttggacgagttcttttaagaattaattcatgaccaaaatcccttaacgtgagttttcgttccactgagcgtcagaccccgtagaaaagatcaaaggatcttcttgagatcctttttttctgcgcgtaatctgctgctatttaaattacgtacacgtgttattactttgttaacgacaattgtcttaattaactgggcctcatgggccttccgctcactgcccgctttccagtcgggaaacctgtcgtgccagctctgcagatgacggtgaaaacctctgacacatgcagctcccggagacggtcacagcttgtctgtaagcggatgccgggagcagacaagcccgtcagggcgcgtcagcgggtgttggcgggtgtcggggcgcagccatgacccagtcacgtagcgatagcggagtgtatactggcttaactatgcggcatcagagcagattgtactgagagtgcaccatatgcggtgtgaaataccgcacagatgcgtaaggagaaaataccgcatcaggcgctcttccgcttcctcgctcactgactcgctgcgctcggtcgttcggctgcggcgagcggtatcagctcactcaaaggcggtaatacggttatccacagaatcaggggataacgcaggaaagaacatgtgagcaaaaggccagcaaaaggccaggaaccgtaaaaaggccgcgttgctggcgtttttccataggctccgcccccctgacgagcatcacaaaaatcgacgctcaagtcagaggtggcgaaacccgacaggactataaagataccaggcgtttccccctggaagctccctcgtgcgctctcctgttccgaccctgccgcttaccggatacctgtccgcctttctcccttcgggaagcgtggcgctttctcatagctcacgctgtaggtatctcagttcggtgtaggtcgttcgctccaagctgggctgtgtgcacgaaccccccgttcagcccgaccgctgcgccttatccggtaactatcgtcttgagtccaacccggtaagacacgacttatcgccactggcagcagccactggtaacaggattagcagagcgaggtatgtaggcggtgctacagagttcttgaagtggtggcctaactacggctacactagaaggacagtatttggtatctgcgctctgctgaagccagttaccttcggaaaaagagttggtagctcttgatccggcaaacaaaccaccgctggtagcggtggtttttttgtttgcaagcagcagattacgcgcagaaaaaaaggatctcaagaagatcctttgatcttttctactgcagaagcttgttagacaccctgtcatgtattttatattatttatttcaccatacggattaagtgaaacctaatgaaaatagtactttcggagctttaactttaatgaaggtatgtttttttatagacatcgatgtctggtttaacaataggaaaaagtagctaaaactcccatgaattaaagaaataacaaggtgtctaacaacctgttattaagaatgttagaaaagacttaacatttgtgttgagtttttatagacattggtgtctagacatacggtagataaggtttgctcaaaaataaaataaaaaaagattggactaaaaaacatttaatttagtacaatttaattagttattttttcgtctcaaattttgctttgttgagcagaaatttagataaaaaaatccccgtgatcagattacaatgtcgttcattgtacgatgtgtcgaaaaatctttacgacactctaaactgaccacacgggggaaaaagaaaactgaactaataacatcatgatactcggaaaacctagcaattctcaacccctaaacaaaagaaacttccaaaaccctgaccatataaaggagtggcaacaatcagcaatcagtcaagatttgatagcagaaaatcttgtatcggttgctaatggttttgatgtactatttatcggcaataaataccgaactaacacgggtgttctgtcacggcacatattaaactcctattctcatttagaagatggtggttcgtatggtagaacatttgacccatttaccaataaagaaatgcagtgggttcaatttaaaccgaatagaccaagaaaaggttctactggtaaggtaatcaaatatgaatcgccaaaaggtgaacctacaagagttctaatgccgtttgtgcctatgaaaatatggcaacggattagcgataagttcggagtaccgattaatccgaaaaaagatactcacttttgggaatgggtaaagaataatccatcgataccgattgccattacagaaggaaataaaaaagctaattgcctattatcctatggctatcctgctattgcctttgtaggcatttggaacggattagagaaaataaatgatttctcgaaggaaaagcagttaaaagaggatttgaaatggttgttatccaacggcaaccgaaatattaatatcatctttgaccaagaccagaaacaaaaaactgtaattaatgtaaacaaagctattttcgctttatcttctctaataagtagaaatggtcataaagttaatattgtgcaatggttgccgtcaaaaggtaaaggaatagatgattatttggtagctttaccttttgagaaaagagaaaatcatttagacaacttaattaaaattgcaccatcatttaatttttggtcaactaaatacttattcaagtgtcgtaaaccagatttaaccgtaaattgccgttatttgagcgatgcagtaaaagaattacctcaagaggatatagcattaatagcacctcacggcacgggtaaaacttcattagtagctactcacgttaagaatcggagttatcacggaaggaaaactatttcattggtgcatcttgaaagtttagccaaagctaatggcaacgcacttggattatattaccgaaccgaaaataatattgaaaagcaatatcttggatttagcttatgtgtagatagttgccgtgataagattaacggcattacaactgatattatttcaggtcaagattattgccttttcattgatgaaattgaccaagtaattccacacatccttaacagtgaaactgaagtaagtaagtatagatgcaccatcattgacactttttctgaactggtgagaaatgctgaacaggtcattattgctgatgctgatttatccgatgtgacgattgacctaatagaaaacatcagaggtaaaaaactatatgtaatcaagaatgaatatcagtatcagggaatgacttttaacgccgttggttcaccattagaaatgatggcaatgatgggaaaatcggtgtcagaaggcaagaaattatttattaacaccacatcccaaaaggcaaaaagtaagtacggcacaatcgctcttgagtcttatatttttggtctaaataaagaagcaaagatattaagaatagactctgaaaccactaaaaaccctgaacatccagcctataaaatcattgaccaagacttaaataatatcctcaaagattatgattatgtcattgcctcaccttgccttcaaacaggtgtcagtattaccttaaaagggcattttgaccagcaatttaacttttccagtggaaacattacacctcattgctttttacagcaaatgtggcggttgagggatgcagaaattgaaagattctattatgtgccgaactcatctaacctcaatctcattgggaataagtcaagttcaccatcagaccttctaaagagcaataacaagatggcaacggcaacggttaaccttttgggtagaatcgactccgaatattccctagagtatgaatcgcacggcatttggcttgagacgtgggcaaaattatcagcacggcataacagttcaatgcgttgttactctgaaattcttacctatctaattacgtctcaagggcataaattaaatatcaacattccctcacctcttgcagatattaagaagctaaatgatgaggtaagtagtaacagggaaaaggtaaaaaatgagagatactctcagaggttaaactcaccagatattaacgatgcagaagctaccatactcgaatctaaagagcaaaaaatcggattgactctcaatgagagatgcaccctagaaaagcataaagttaagaagcggtatgggaatgtaaagatggatattctcacctttgatgatgatggactataccccaaactcagactattttattacctcaccatcggtaaacctcatctcaaggctaatgacagaaaagctattgccaaaatgggcaatgacaataaaggcaagattctatcaaaagacttagttaataaaacttactccgctcgtgtgaaggtcttagagattcttaaactaactgactttatcgacaatcttagagatgaactcttaataactcccaataatccagctatcaccgattttaataatcttctgctaagagctaagaaggatttaagagtattaggagtcaacatcggaaaatatccaatggccaacattaatgccgtacttactctcattggtcacaaactttctgtaatgagagatgagttcggaaaagagaaaaggataaaagtagatggtaaatcataccgatgttatcaacttgaaacattaccagattttaccaatgatactcttgactactggttagaaaatgatagccaaaaagaagtaacagcaacagaaaattactccgaaaattttaacccttcaaatagctacaatccagacagtaagacactttcagagggtgcaaatttcctatatataaataaagaagaattgcatccaaataaattgcacctagaaataaaagaaggtgctgaactttttttattcggggtaaaggtgattgtgaaaggaatcttggacggggcagtaactatattctctatgggtcaagaatacgatttatccctcaatgaactagaggggatgttaacatcatgaactttacaagaatctttttaaagggcgatcgcaccatgttaaatgatggtacatttgttcagatatttgatatttaccatgaccacgcattgggagtgacccttgaccttaagacagaaaaaattatttccgatgatgttagggtaattactgtcaaagacttattgttcgatggcacttataaaggggtaaaatcttttatgcccgataatgcccgataatgcccgattgatgctacaaaatcccataatcataagcgataatcccctaatagcttgtaattcttgaaccgtagcgattttagagtattccaaaaagaagaaataaacaccgcaaaatgtcgtatttcacatatataaaccaaggttttttgccctaaaatctttatgtttgtagtgtgatgttgggtcaaaatggtcagaaaagttgcaaggtttttatggatgcttacgcgcgcgaggggtaagcatccccaaatagttactttatcctagtccatgcccatttattgccgtcccgttcggctttaaaaaagtgccaaaactcacaaggtgcaataaaaagttctgtacctttcgcaaccctagataatctttcaacagttactttttttcctattatctcggtacaaagtttggctagtttctcttttccctctttttcaatcaagccttcttgtatgcccaactcattgattaatctctctatttttaccattatttcccgttcaggtagtttatcccctaaatcttcatcggggggcaatgtagggcattctgaaggggctttttcttctgtctggacattatctaatattgaagtaaccaaactatcttcagttttttctattcctattaattcatattcggttactgtatccgtatcaatatccgaataactatctttatccgtattagctattcggttaagtttatccgttaactcagaaacaagactatatagcggttttagcttttcttctatcctgttatctaatacggataagtttatacggttatcattatccgtattagtatcattgggcttttttggtagttctaccccctcataaaccgcttttattcccaattccaacagactgataacagtatcctttataatgggttttttgctgatatggtgaacttttgccccttccatcattgcgatactttctatctcactcatcaacttatcgcttaagtgaatctcgtatctgtttaatcccttactggttttattcatatccgtttactttattcggttaacaattctattttatacgaataaaatattatacggttaactttatacgtttaactattttatctatacggataacagtaataagttattcgtattagttatacgtttacttttatccaaataaaattagtgcatttaaactaaaagaatgattttatcggagttgatagcattggattaacctaaagatgtttataagctatatctgataagtatttaaggttattttgttattctgtttattgacattatcagaataaaagaatagaatataattgttgagagataagaggtttaagtgattatggttaagaagttagttggttatgtcagggtcagtagtgaatcgcaagaggataacactagcttacagaatcagatagagagaattgaagcatattgtatggcttttggttatgagttggtaaaaatattcaaagaggttgccactggtacaaaagcagatattgaaacccgtcctatttttaatgaagctatagaatacttgaaacaggataatgctaatggaattattgccttgaagctagaccgaatcgcacggaatgctttagatgtattgcgtttggttcgtgaaaccttagaaccacaaaataaaatgttagtgttactagatattcaggtagatacttcgacaccttcaggaaaaatgattttaactgtaatgagtgccgttgctgaactcgaaagagacatgatctatgatcgcactcaggggggtagaaagactaaagcccaaaagggcgggtatgcctacgggaaacctaaatttggctataagactgaagaaaaggaactaaaagaagattcagcacaacaggaaactattaaactaattaagagacaccgtaggtcagggaaaagctaccagaaaatagctgattatctcaatgcccaaagtattcccactaaacaaggtaagaaatggagttctagcgtcgtctatcgaatctgtcaggaaaaagctggttaagtctgtttatagatatttagaatttattgaataaaaatagtatgaacaataaatatttatggactaaccacgctcggaaacgtttaactgaacgatgggaaataaaagaatcatgggttattgataccatcgaaaatcctgaacgttcagaatttattgttgatgagtcaggggaaaaatatcattactataaaagaatagctaagtttaagaatagagtgttagaagtgataacttctgccaactcaacacccacaagaataataaccttttactttaaccgtaacatgaggaaaaatttatgattgttacttacgataatgaagttgacgcaatttattttaagttaacggaaaataaaattgatagcaccgaacctcaaacagacaggattatcattgattacgatgaaagtaataatattgttggcattgaggtattagattttaattatcttgtcaagaaaggtttaaccgttgctgatttacctttttctgaagatgaaagattaacagcttctcaatattttaattttcctgttgctatctaatccagaaggggcaataatccccttctttcatcgagttagacttaatatcacaaaagtcattttcattttaccgtttcttttccacagcgtccgtacgcccctcgttaaatctcaaaaccgacaatttatgatgtttataaaaagttactcactttaataagtatttatactcattaaagggttattctttttttgtagcctgataggttgggaaggaatatttcagattatcagatttgttgaatatttttcgtcagatacgcaaaccttacaaacataattaacaactgaaactattgatatgtctaggttttagctctatcacaggttggatctg

SEQ ID NO: 103 - DNA, 13134 bp, Cyanobacterium sp. ABICyano1
tcgactggtcaagttactatatgtttagaaacaacaaaaaaagaagtcattataaaaataattgatacaggaattggcattaataaagaagaacaaaaattaatttttaatcgtttttatcgaatcaataaagcaagaaatagagagaaaggcagttgcggattaggtttagctattgcaaatgcgatcgcgcttaatcatggtggtagaataattttagaaagtcaagaaaatcaaggcagtatttttaccgtttatttaccgaaaatcatttcatcctaatttcatattcttttgacagaatcaaaggtaaagataaaaagagagaaacagtcatgaattcttacactgttggaacctatttagcagaacgtttagttcaaattggtctcaaacaccattttgcagtagctggtgattataatttagttttattggataacttattgttaaataagaatatggaacaagtgtattgttgtaatgaattaaactgtggtttttctgctgagggatatgctcgtgcaaaaggtgctgccgcagcagttgttacttattctgttggagcattaagtgcttttgacgctattggaggtgcttatgcagaaaatttacctgtaatcttaatctctggtgcacccaataacaacgatcacgctgctggtcatgtattgcatcatgctttaggtaaaaccgattatcattaccaattagaaatggcaaaaaatattaccgctgccgcagaagctatttatactcccgaagaagcacctgctaagatcgatcacgtaattaaaaccgctctccgtgagaaaaaacccgtatatttagaaatcgcttgcaatatcgcttctatgccttgtgcagctcctggacctgctagtgctttatttaacgatgaagcatctgatgaggctagtttaaatgccgctgttgaagaaactttgaaatttattgctaatcgtgataaagtagctgttttagttggttctaaactccgtgccgctggtgcagaagaagcggctgtaaaattcgcagatgccttaggaggtgctgttgccacaatggcagccgctaaaagttttttccccgaagaaaatcctcattacattggtacttcttggggtgaggtatcttaccctggtgtagaaaaaaccatgaaggaagctgatgcagtaattgcattagctcctgttttcaatgattactctaccactggttggactgatattccagaccccaaaaaattagttttagcagaacctcgctctgtagttgtgaatggtgttagatttcccagtgtacatctcaaagattatttaactcgtttagctcaaaaagtgagtaaaaagactggcgcactcgatttctttaaatctttaaatgctggtgaattaaagaaagcagctcctgctgatcccagtgctcctttagtgaatgccgaaatcgcaagacaagttgaagccttgttaactcctaacactaccgttattgccgagactggtgatagttggttcaatgctcaacgcatgaaattacccaatggtgctcgtgttgagtatgaaatgcaatggggtcacattggatggtctgttcctgctgcatttggatatgcagttggagcacctgagcgtagaaacattttaatggtaggtgatggttctttccaactcactgctcaagaagttgcacaaatggtacgtttaaaattgcctgttattatctttctcattaacaactatggttacaccattgaagttatgattcatgatggtccttataataacattaagaattgggattacgcaggtttaatggaggtatttaacggtaatggtggatacgacagtggagcaggtaaaggattaaaagctaaaacaggaggtgagttagctgaagcaattaaagtagctttagccaatacagatggtcctaccttaatcgaatgtttcattggacgtgaagattgtactgaagagttagttaaatggggaaagcgtgttgccgctgcaaattctcgtaaacctgtaaacaaactcttgtagttaggatccagcaaggtttcatcccgaccccctcagggtcgggatttttttattgtgagctcaactttagatattcgtagttggcaatgtcgtaaatgcggaacaatacatggaaaacatatagatttgtaatgagaaaaagtgtaaacaaatattaagaaaaagatcagaaaaatttaacaacacgtaataaaaaaatgcgtcactacgggttataaatttacatgaaaggttaaaacacttttctgagacgattttgataaaaaagttgtcaaaaaattaagtttctttacaaatgcttaacaaaaacttggttttaagcacaaaataagagagactaatttgcagaagttttacaaggaaatcttgaagaaaaagatctaagtaaaacgactctgtttaaccaaaatttaacaaatttaacaaaacaaactaaatctattaggagattaactacatatgagtgaaactaaatttaaagcctatgccgtaatgaatcctggtgaaaaattacaaccctgggaatatgaacctgctcctttacaggtagatgaaattgaagtaagagttactcacaatggtttatgtcacactgacttacacatgagagataatgactggaatgttagtgagttccccttagtagcaggtcatgaagttgttggtgaagtaaccgctgttggtgaaaaagtaaccagtcgtaaaaaaggtgatagagttggtgtaggttggattcgtaattcttgtcgcgcttgtgaccattgtttacaaggagaagagaacatttgtagagagggttatactggtttaattgttggtcatcacggtggatttgctgatcgtgtacgtgtacctgctgacttcacttataaaattcctgatgctttagatagtgcatctgctgctcctttattatgtgccggtattaccgtttacactcctttaagaacctacattaaacatcccggtatgaaagtaggtgttatgggtattggaggattaggacatttagctattaaatttgctcgtgcaatgggagcagaagttactgcctttagtaccagtcctaataaagaagcccaagccaaagaatttggtgctcatcatttccaacaatggggtactgctgaagaaatgaaagctgttgccggtaattttgatttagttttatctaccatctctgctgaaactgactgggatgctgccttctctttattagcaaataacggtgttttatgtttcgtaggtattcccgttagttctttaaatgttcctttaattcctttaattttcggacaaaaatctgttgtaggttctgtagttggaggaagaagattcatggcagaaatgttagagttcgccgctgtaaatcagattaaacctatgatcgaaactatgcccttatctcaagtaaatgaagctatggataaagttgccgccaataaagccagatatagaattgtattattatctgaataactagatctacttctaaactgaaacaaatttgagggtaggcttcattgtctgcccttatttttttatttaggaaaagtgaacagactaaagagtgttggctctattgctttgagtatgtaaattaggcgttgctgaattaaggtatgatttttgacccctgcaggatcatcttgctgaaaaactcgagcgctcgttccgcaaagcggtacggagttagttaggggctaatgggcattctcccgtacaggaaagagttagaagttattaattatcaacaattctcctttgcctagtgcatcgttacctttttaattaaaacataaggaaaactaataatcgtaataatttaacctcaaagtgtaaagaaatgtgaaattctgacttttataacgttaaagagggaaaaattagcagtttaaaatacctagagaatagtctggggtaagcatagagaattagattagttaagttaatcaaattcagaaaaaataataatcgtaaatagttaatctgggtgtatagaaaatgatccccttcatgataagatttaaactcgaaaagcaaaagccaaaaaactaacttccattaaaagaagttgttacatataacgctataaagaaaatttatatatttggaggataccaaccatgtctcatattcaacgtgaaactagttgttctcgccctcgtttaaattctaatatggatgccgatttatatggttataaatgggctcgtgataatgttggtcaatctggtgctactatttatcgtttatatggtaaacctgatgctcctgaattattcttgaaacatggtaaaggttctgttgctaatgatgttactgatgaaatggttcgtttaaactggttgactgaatttatgcctttacctactattaaacattttattcgtactcccgatgatgcttggttattaactactgctattcctggtaaaactgcttttcaagttttagaagaatatcctgattctggtgaaaatattgttgatgctttagctgtttttttacgtcgtttacattctattcccgtttgtaattgtccttttaattctgatcgtgtttttcgtttagctcaagctcaatctcgtatgaataatggtttagttgatgcttctgattttgatgatgaacgtaatggttggcctgttgaacaagtttggaaagaaatgcacaaattgttacctttttctcctgattctgttgttactcatggtgatttttctttagataatttgatctttgatgaaggtaaattgattggttgtattgatgttggtcgtgttggtattgctgatcgttatcaagatttagctattttatggaattgtttaggtgaattttctccttctttacagaaacgtttatttcagaaatatggtattgataatcctgatatgaacaagttacaatttcatttaatgttggacgagttcttttaagaattaattcatgaccaaaatcccttaacgtgagttttcgttccactgagcgtcagaccccgtagaaaagatcaaaggatcttcttgagatcctttttttctgcgcgtaatctgctgctatttaaattacgtacacgtgttattactttgttaacgacaattgtcttaattaactgggcctcatgggccttccgctcactgcccgctttccagtcgggaaacctgtcgtgccagctctgcagatgacggtgaaaacctctgacacatgcagctcccggagacggtcacagcttgtctgtaagcggatgccgggagcagacaagcccgtcagggcgcgtcagcgggtgttggcgggtgtcggggcgcagccatgacccagtcacgtagcgatagcggagtgtatactggcttaactatgcggcatcagagcagattgtactgagagtgcaccatatgcggtgtgaaataccgcacagatgcgtaaggagaaaataccgcatcaggcgctcttccgcttcctcgctcactgactcgctgcgctcggtcgttcggctgcggcgagcggtatcagctcactcaaaggcggtaatacggttatccacagaatcaggggataacgcaggaaagaacatgtgagcaaaaggccagcaaaaggccaggaaccgtaaaaaggccgcgttgctggcgtttttccataggctccgcccccctgacgagcatcacaaaaatcgacgctcaagtcagaggtggcgaaacccgacaggactataaagataccaggcgtttccccctggaagctccctcgtgcgctctcctgttccgaccctgccgcttaccggatacctgtccgcctttctcccttcgggaagcgtggcgctttctcatagctcacgctgtaggtatctcagttcggtgtaggtcgttcgctccaagctgggctgtgtgcacgaaccccccgttcagcccgaccgctgcgccttatccggtaactatcgtcttgagtccaacccggtaagacacgacttatcgccactggcagcagccactggtaacaggattagcagagcgaggtatgtaggcggtgctacagagttcttgaagtggtggcctaactacggctacactagaaggacagtatttggtatctgcgctctgctgaagccagttaccttcggaaaaagagttggtagctcttgatccggcaaacaaaccaccgctggtagcggtggtttttttgtttgcaagcagcagattacgcgcagaaaaaaaggatctcaagaagatcctttgatcttttctactgcagaagcttgttagacaccctgtcatgtattttatattatttatttcaccatacggattaagtgaaacctaatgaaaatagtactttcggagctttaactttaatgaaggtatgtttttttatagacatcgatgtctggtttaacaataggaaaaagtagctaaaactcccatgaattaaagaaataacaaggtgtctaacaacctgttattaagaatgttagaaaagacttaacatttgtgttgagtttttatagacattggtgtctagacatacggtagataaggtttgctcaaaaataaaataaaaaaagattggactaaaaaacatttaatttagtacaatttaattagttattttttcgtctcaaattttgctttgttgagcagaaatttagataaaaaaatccccgtgatcagattacaatgtcgttcattgtacgatgtgtcgaaaaatctttacgacactctaaactgaccacacgggggaaaaagaaaactgaactaataacatcatgatactcggaaaacctagcaattctcaacccctaaacaaaagaaacttccaaaaccctgaccatataaaggagtggcaacaatcagcaatcagtcaagatttgatagcagaaaatcttgtatcggttgctaatggttttgatgtactatttatcggcaataaataccgaactaacacgggtgttctgtcacggcacatattaaactcctattctcatttagaagatggtggttcgtatggtagaacatttgacccatttaccaataaagaaatgcagtgggttcaatttaaaccgaatagaccaagaaaaggttctactggtaaggtaatcaaatatgaatcgccaaaaggtgaacctacaagagttctaatgccgtttgtgcctatgaaaatatggcaacggattagcgataagttcggagtaccgattaatccgaaaaaagatactcacttttgggaatgggtaaagaataatccatcgataccgattgccattacagaaggaaataaaaaagctaattgcctattatcctatggctatcctgctattgcctttgtaggcatttggaacggattagagaaaataaatgatttctcgaaggaaaagcagttaaaagaggatttgaaatggttgttatccaacggcaaccgaaatattaatatcatctttgaccaagaccagaaacaaaaaactgtaattaatgtaaacaaagctattttcgctttatcttctctaataagtagaaatggtcataaagttaatattgtgcaatggttgccgtcaaaaggtaaaggaatagatgattatttggtagctttaccttttgagaaaagagaaaatcatttagacaacttaattaaaattgcaccatcatttaatttttggtcaactaaatacttattcaagtgtcgtaaaccagatttaaccgtaaattgccgttatttgagcgatgcagtaaaagaattacctcaagaggatatagcattaatagcacctcacggcacgggtaaaacttcattagtagctactcacgttaagaatcggagttatcacggaaggaaaactatttcattggtgcatcttgaaagtttagccaaagctaatggcaacgcacttggattatattaccgaaccgaaaataatattgaaaagcaatatcttggatttagcttatgtgtagatagttgccgtgataagattaacggcattacaactgatattatttcaggtcaagattattgccttttcattgatgaaattgaccaagtaattccacacatccttaacagtgaaactgaagtaagtaagtatagatgcaccatcattgacactttttctgaactggtgagaaatgctgaacaggtcattattgctgatgctgatttatccgatgtgacgattgacctaatagaaaacatcagaggtaaaaaactatatgtaatcaagaatgaatatcagtatcagggaatgacttttaacgccgttggttcaccattagaaatgatggcaatgatgggaaaatcggtgtcagaaggcaagaaattatttattaacaccacatcccaaaaggcaaaaagtaagtacggcacaatcgctcttgagtcttatatttttggtctaaataaagaagcaaagatattaagaatagactctgaaaccactaaaaaccctgaacatccagcctataaaatcattgaccaagacttaaataatatcctcaaagattatgattatgtcattgcctcaccttgccttcaaacaggtgtcagtattaccttaaaagggcattttgaccagcaatttaacttttccagtggaaacattacacctcattgctttttacagcaaatgtggcggttgagggatgcagaaattgaaagattctattatgtgccgaactcatctaacctcaatctcattgggaataagtcaagttcaccatcagaccttctaaagagcaataacaagatggcaacggcaacggttaaccttttgggtagaatcgactccgaatattccctagagtatgaatcgcacggcatttggcttgagacgtgggcaaaattatcagcacggcataacagttcaatgcgttgttactctgaaattcttacctatctaattacgtctcaagggcataaattaaatatcaacattccctcacctcttgcagatattaagaagctaaatgatgaggtaagtagtaacagggaaaaggtaaaaaatgagagatactctcagaggttaaactcaccagatattaacgatgcagaagctaccatactcgaatctaaagagcaaaaaatcggattgactctcaatgagagatgcaccctagaaaagcataaagttaagaagcggtatgggaatgtaaagatggatattctcacctttgatgatgatggactataccccaaactcagactattttattacctcaccatcggtaaacctcatctcaaggctaatgacagaaaagctattgccaaaatgggcaatgacaataaaggcaagattctatcaaaagacttagttaataaaacttactccgctcgtgtgaaggtcttagagattcttaaactaactgactttatcgacaatcttagagatgaactcttaataactcccaataatccagctatcaccgattttaataatcttctgctaagagctaagaaggatttaagagtattaggagtcaacatcggaaaatatccaatggccaacattaatgccgtacttactctcattggtcacaaactttctgtaatgagagatgagttcggaaaagagaaaaggataaaagtagatggtaaatcataccgatgttatcaacttgaaacattaccagattttaccaatgatactcttgactactggttagaaaatgatagccaaaaagaagtaacagcaacagaaaattactccgaaaattttaacccttcaaatagctacaatccagacagtaagacactttcagagggtgcaaatttcctatatataaataaagaagaattgcatccaaataaattgcacctagaaataaaagaaggtgctgaactttttttattcggggtaaaggtgattgtgaaaggaatcttggacggggcagtaactatattctctatgggtcaagaatacgatttatccctcaatgaactagaggggatgttaacatcatgaactttacaagaatctttttaaagggcgatcgcaccatgttaaatgatggtacatttgttcagatatttgatatttaccatgaccacgcattgggagtgacccttgaccttaagacagaaaaaattatttccgatgatgttagggtaattactgtcaaagacttattgttcgatggcacttataaaggggtaaaatcttttatgcccgataatgcccgataatgcccgattgatgctacaaaatcccataatcataagcgataatcccctaatagcttgtaattcttgaaccgtagcgattttagagtattccaaaaagaagaaataaacaccgcaaaatgtcgtatttcacatatataaaccaaggttttttgccctaaaatctttatgtttgtagtgtgatgttgggtcaaaatggtcagaaaagttgcaaggtttttatggatgcttacgcgcgcgaggggtaagcatccccaaatagttactttatcctagtccatgcccatttattgccgtcccgttcggctttaaaaaagtgccaaaactcacaaggtgcaataaaaagttctgtacctttcgcaaccctagataatctttcaacagttactttttttcctattatctcggtacaaagtttggctagtttctcttttccctctttttcaatcaagccttcttgtatgcccaactcattgattaatctctctatttttaccattatttcccgttcaggtagtttatcccctaaatcttcatcggggggcaatgtagggcattctgaaggggctttttcttctgtctggacattatctaatattgaagtaaccaaactatcttcagttttttctattcctattaattcatattcggttactgtatccgtatcaatatccgaataactatctttatccgtattagctattcggttaagtttatccgttaactcagaaacaagactatatagcggttttagcttttcttctatcctgttatctaatacggataagtttatacggttatcattatccgtattagtatcattgggcttttttggtagttctaccccctcataaaccgcttttattcccaattccaacagactgataacagtatcctttataatgggttttttgctgatatggtgaacttttgccccttccatcattgcgatactttctatctcactcatcaacttatcgcttaagtgaatctcgtatctgtttaatcccttactggttttattcatatccgtttactttattcggttaacaattctattttatacgaataaaatattatacggttaactttatacgtttaactattttatctatacggataacagtaataagttattcgtattagttatacgtttacttttatccaaataaaattagtgcatttaaactaaaagaatgattttatcggagttgatagcattggattaacctaaagatgtttataagctatatctgataagtatttaaggttattttgttattctgtttattgacattatcagaataaaagaatagaatataattgttgagagataagaggtttaagtgattatggttaagaagttagttggttatgtcagggtcagtagtgaatcgcaagaggataacactagcttacagaatcagatagagagaattgaagcatattgtatggcttttggttatgagttggtaaaaatattcaaagaggttgccactggtacaaaagcagatattgaaacccgtcctatttttaatgaagctatagaatacttgaaacaggataatgctaatggaattattgccttgaagctagaccgaatcgcacggaatgctttagatgtattgcgtttggttcgtgaaaccttagaaccacaaaataaaatgttagtgttactagatattcaggtagatacttcgacaccttcaggaaaaatgattttaactgtaatgagtgccgttgctgaactcgaaagagacatgatctatgatcgcactcaggggggtagaaagactaaagcccaaaagggcgggtatgcctacgggaaacctaaatttggctataagactgaagaaaaggaactaaaagaagattcagcacaacaggaaactattaaactaattaagagacaccgtaggtcagggaaaagctaccagaaaatagctgattatctcaatgcccaaagtattcccactaaacaaggtaagaaatggagttctagcgtcgtctatcgaatctgtcaggaaaaagctggttaagtctgtttatagatatttagaatttattgaataaaaatagtatgaacaataaatatttatggactaaccacgctcggaaacgtttaactgaacgatgggaaataaaagaatcatgggttattgataccatcgaaaatcctgaacgttcagaatttattgttgatgagtcaggggaaaaatatcattactataaaagaatagctaagtttaagaatagagtgttagaagtgataacttctgccaactcaacacccacaagaataataaccttttactttaaccgtaacatgaggaaaaatttatgattgttacttacgataatgaagttgacgcaatttattttaagttaacggaaaataaaattgatagcaccgaacctcaaacagacaggattatcattgattacgatgaaagtaataatattgttggcattgaggtattagattttaattatcttgtcaagaaaggtttaaccgttgctgatttacctttttctgaagatgaaagattaacagcttctcaatattttaattttcctgttgctatctaatccagaaggggcaataatccccttctttcatcgagttagacttaatatcacaaaagtcattttcattttaccgtttcttttccacagcgtccgtacgcccctcgttaaatctcaaaaccgacaatttatgatgtttataaaaagttactcactttaataagtatttatactcattaaagggttattctttttttgtagcctgataggttgggaaggaatatttcagattatcagatttgttgaatatttttcgtcagatacgcaaaccttacaaacataattaacaactgaaactattgatatgtctaggttttagctctatcacaggttggatctg

SEQ ID NO: 104 - DNA, 13122 bp, Cyanobacterium sp. ABICyano1
tcgactggtcaagttactatatgtttagaaacaacaaaaaaagaagtcattataaaaataattgatacaggaattggcattaataaagaagaacaaaaattaatttttaatcgtttttatcgaatcaataaagcaagaaatagagagaaaggcagttgcggattaggtttagctattgcaaatgcgatcgcgcttaatcatggtggtagaataattttagaaagtcaagaaaatcaaggcagtatttttaccgtttatttaccgaaaatcatttcatcctaatttcatattcttttgacagaatcaaaggtaaagataaaaagagagaaacagtcatgaattcttacactgttggaacctatttagcagaacgtttagttcaaattggtctcaaacaccattttgcagtagctggtgattataatttagttttattggataacttattgttaaataagaatatggaacaagtgtattgttgtaatgaattaaactgtggtttttctgctgagggatatgctcgtgcaaaaggtgctgccgcagcagttgttacttattctgttggagcattaagtgcttttgacgctattggaggtgcttatgcagaaaatttacctgtaatcttaatctctggtgcacccaataacaacgatcacgctgctggtcatgtattgcatcatgctttaggtaaaaccgattatcattaccaattagaaatggcaaaaaatattaccgctgccgcagaagctatttatactcccgaagaagcacctgctaagatcgatcacgtaattaaaaccgctctccgtgagaaaaaacccgtatatttagaaatcgcttgcaatatcgcttctatgccttgtgcagctcctggacctgctagtgctttatttaacgatgaagcatctgatgaggctagtttaaatgccgctgttgaagaaactttgaaatttattgctaatcgtgataaagtagctgttttagttggttctaaactccgtgccgctggtgcagaagaagcggctgtaaaattcgcagatgccttaggaggtgctgttgccacaatggcagccgctaaaagttttttccccgaagaaaatcctcattacattggtacttcttggggtgaggtatcttaccctggtgtagaaaaaaccatgaaggaagctgatgcagtaattgcattagctcctgttttcaatgattactctaccactggttggactgatattccagaccccaaaaaattagttttagcagaacctcgctctgtagttgtgaatggtgttagatttcccagtgtacatctcaaagattatttaactcgtttagctcaaaaagtgagtaaaaagactggcgcactcgatttctttaaatctttaaatgctggtgaattaaagaaagcagctcctgctgatcccagtgctcctttagtgaatgccgaaatcgcaagacaagttgaagccttgttaactcctaacactaccgttattgccgagactggtgatagttggttcaatgctcaacgcatgaaattacccaatggtgctcgtgttgagtatgaaatgcaatggggtcacattggatggtctgttcctgctgcatttggatatgcagttggagcacctgagcgtagaaacattttaatggtaggtgatggttctttccaactcactgctcaagaagttgcacaaatggtacgtttaaaattgcctgttattatctttctcattaacaactatggttacaccattgaagttatgattcatgatggtccttataataacattaagaattgggattacgcaggtttaatggaggtatttaacggtaatggtggatacgacagtggagcaggtaaaggattaaaagctaaaacaggaggtgagttagctgaagcaattaaagtagctttagccaatacagatggtcctaccttaatcgaatgtttcattggacgtgaagattgtactgaagagttagttaaatggggaaagcgtgttgccgctgcaaattctcgtaaacctgtaaacaaactcttgtagttaggatccagcaaggtttcatcccgaccccctcagggtcgggatttttttattgtgagctcaactttagatattcgtagttggcaatgtcgtaaatgcggaacaatacatggaaaacatatagatttgtaatgagaaaaagtgtaaacaaatattaagaaaaagatcagaaaaatttaacaacacgtaataaaaaaatgcgtcactacgggttataaatttacatgaaaggttaaaacacttttctgagacgattttgataaaaaagttgtcaaaaaattaagtttctttacaaatgcttaacaaaaacttggttttaagcacaaaataagagagactaatttgcagaagttttacaaggaaatcttgaagaaaaagatctaagtaaaacgactctgtttaaccaaaatttaacaaatttaacaaaacaaactaaatctattaggagattaactacatatgcctatgatcaaagccttcgcagttcatgagtctgatggagatttacagccttttgaatatgatcctggtgcattattatctgatcaagttgagatcgaagttaaatattgtggaatttgtcattctgatttatctatgatctctaatgaatggggtatgacccaataccctttagtacctggacatgaggtagtaggtgcaatcgccaaagtaggtgaaaatgttaaaaatttatctgttggtcaaattgtaggattaggttggcacgcaggttattgtaacgaatgtcctcaatgtactactggtgatcaaaatttatgtgctactgctcaaggaactattgtaggacatcatggaggtttcgctgaaaaagttcgcgctgctgcaaattctgtagttcccatccctgaaggaatcgatttagaagctgctggacctttattttgtggaggtatcaccgtttttaatcctttagtacaatatggaatccaacccactgcaaaagttgctgtaattggaattggaggtttaggtcacatggctgttcaattcttaaacgcttggggttgtgaagttaccgcttttaccagttctgaagcaaaaatcactgaggctttagaattaggtgctcatcacactttaaacagtcgtgaccctgaagccatcgcagccgctgctggacagtttgatttaatcatttctaccgttaacgttaaattagattggaatgcctatttaagtactttaaaacctcacggtcgtttacacttcgtaggtgctactttagatcccttagacattaacgtttttgctttaatcatgcagcaacgttctatctctggtagtcctgttggatctcctgcaaccatcgcaaaaatgttagaatttgcaaaattacataaaattcaacctaaaattgaaacctttaaatttgaagatgttaaccaggctattgcacgtttaaaaagtggtgaagcccactatcgtattgtattatgtagataactagatctacttctaaactgaaacaaatttgagggtaggcttcattgtctgcccttatttttttatttaggaaaagtgaacagactaaagagtgttggctctattgctttgagtatgtaaattaggcgttgctgaattaaggtatgatttttgacccctgcaggatcatcttgctgaaaaactcgagcgctcgttccgcaaagcggtacggagttagttaggggctaatgggcattctcccgtacaggaaagagttagaagttattaattatcaacaattctcctttgcctagtgcatcgttacctttttaattaaaacataaggaaaactaataatcgtaataatttaacctcaaagtgtaaagaaatgtgaaattctgacttttataacgttaaagagggaaaaattagcagtttaaaatacctagagaatagtctggggtaagcatagagaattagattagttaagttaatcaaattcagaaaaaataataatcgtaaatagttaatctgggtgtatagaaaatgatccccttcatgataagatttaaactcgaaaagcaaaagccaaaaaactaacttccattaaaagaagttgttacatataacgctataaagaaaatttatatatttggaggataccaaccatgtctcatattcaacgtgaaactagttgttctcgccctcgtttaaattctaatatggatgccgatttatatggttataaatgggctcgtgataatgttggtcaatctggtgctactatttatcgtttatatggtaaacctgatgctcctgaattattcttgaaacatggtaaaggttctgttgctaatgatgttactgatgaaatggttcgtttaaactggttgactgaatttatgcctttacctactattaaacattttattcgtactcccgatgatgcttggttattaactactgctattcctggtaaaactgcttttcaagttttagaagaatatcctgattctggtgaaaatattgttgatgctttagctgtttttttacgtcgtttacattctattcccgtttgtaattgtccttttaattctgatcgtgtttttcgtttagctcaagctcaatctcgtatgaataatggtttagttgatgcttctgattttgatgatgaacgtaatggttggcctgttgaacaagtttggaaagaaatgcacaaattgttacctttttctcctgattctgttgttactcatggtgatttttctttagataatttgatctttgatgaaggtaaattgattggttgtattgatgttggtcgtgttggtattgctgatcgttatcaagatttagctattttatggaattgtttaggtgaattttctccttctttacagaaacgtttatttcagaaatatggtattgataatcctgatatgaacaagttacaatttcatttaatgttggacgagttcttttaagaattaattcatgaccaaaatcccttaacgtgagttttcgttccactgagcgtcagaccccgtagaaaagatcaaaggatcttcttgagatcctttttttctgcgcgtaatctgctgctatttaaattacgtacacgtgttattactttgttaacgacaattgtcttaattaactgggcctcatgggccttccgctcactgcccgctttccagtcgggaaacctgtcgtgccagctctgcagatgacggtgaaaacctctgacacatgcagctcccggagacggtcacagcttgtctgtaagcggatgccgggagcagacaagcccgtcagggcgcgtcagcgggtgttggcgggtgtcggggcgcagccatgacccagtcacgtagcgatagcggagtgtatactggcttaactatgcggcatcagagcagattgtactgagagtgcaccatatgcggtgtgaaataccgcacagatgcgtaaggagaaaataccgcatcaggcgctcttccgcttcctcgctcactgactcgctgcgctcggtcgttcggctgcggcgagcggtatcagctcactcaaaggcggtaatacggttatccacagaatcaggggataacgcaggaaagaacatgtgagcaaaaggccagcaaaaggccaggaaccgtaaaaaggccgcgttgctggcgtttttccataggctccgcccccctgacgagcatcacaaaaatcgacgctcaagtcagaggtggcgaaacccgacaggactataaagataccaggcgtttccccctggaagctccctcgtgcgctctcctgttccgaccctgccgcttaccggatacctgtccgcctttctcccttcgggaagcgtggcgctttctcatagctcacgctgtaggtatctcagttcggtgtaggtcgttcgctccaagctgggctgtgtgcacgaaccccccgttcagcccgaccgctgcgccttatccggtaactatcgtcttgagtccaacccggtaagacacgacttatcgccactggcagcagccactggtaacaggattagcagagcgaggtatgtaggcggtgctacagagttcttgaagtggtggcctaactacggctacactagaaggacagtatttggtatctgcgctctgctgaagccagttaccttcggaaaaagagttggtagctcttgatccggcaaacaaaccaccgctggtagcggtggtttttttgtttgcaagcagcagattacgcgcagaaaaaaaggatctcaagaagatcctttgatcttttctactgcagaagcttgttagacaccctgtcatgtattttatattatttatttcaccatacggattaagtgaaacctaatgaaaatagtactttcggagctttaactttaatgaaggtatgtttttttatagacatcgatgtctggtttaacaataggaaaaagtagctaaaactcccatgaattaaagaaataacaaggtgtctaacaacctgttattaagaatgttagaaaagacttaacatttgtgttgagtttttatagacattggtgtctagacatacggtagataaggtttgctcaaaaataaaataaaaaaagattggactaaaaaacatttaatttagtacaatttaattagttattttttcgtctcaaattttgctttgttgagcagaaatttagataaaaaaatccccgtgatcagattacaatgtcgttcattgtacgatgtgtcgaaaaatctttacgacactctaaactgaccacacgggggaaaaagaaaactgaactaataacatcatgatactcggaaaacctagcaattctcaacccctaaacaaaagaaacttccaaaaccctgaccatataaaggagtggcaacaatcagcaatcagtcaagatttgatagcagaaaatcttgtatcggttgctaatggttttgatgtactatttatcggcaataaataccgaactaacacgggtgttctgtcacggcacatattaaactcctattctcatttagaagatggtggttcgtatggtagaacatttgacccatttaccaataaagaaatgcagtgggttcaatttaaaccgaatagaccaagaaaaggttctactggtaaggtaatcaaatatgaatcgccaaaaggtgaacctacaagagttctaatgccgtttgtgcctatgaaaatatggcaacggattagcgataagttcggagtaccgattaatccgaaaaaagatactcacttttgggaatgggtaaagaataatccatcgataccgattgccattacagaaggaaataaaaaagctaattgcctattatcctatggctatcctgctattgcctttgtaggcatttggaacggattagagaaaataaatgatttctcgaaggaaaagcagttaaaagaggatttgaaatggttgttatccaacggcaaccgaaatattaatatcatctttgaccaagaccagaaacaaaaaactgtaattaatgtaaacaaagctattttcgctttatcttctctaataagtagaaatggtcataaagttaatattgtgcaatggttgccgtcaaaaggtaaaggaatagatgattatttggtagctttaccttttgagaaaagagaaaatcatttagacaacttaattaaaattgcaccatcatttaatttttggtcaactaaatacttattcaagtgtcgtaaaccagatttaaccgtaaattgccgttatttgagcgatgcagtaaaagaattacctcaagaggatatagcattaatagcacctcacggcacgggtaaaacttcattagtagctactcacgttaagaatcggagttatcacggaaggaaaactatttcattggtgcatcttgaaagtttagccaaagctaatggcaacgcacttggattatattaccgaaccgaaaataatattgaaaagcaatatcttggatttagcttatgtgtagatagttgccgtgataagattaacggcattacaactgatattatttcaggtcaagattattgccttttcattgatgaaattgaccaagtaattccacacatccttaacagtgaaactgaagtaagtaagtatagatgcaccatcattgacactttttctgaactggtgagaaatgctgaacaggtcattattgctgatgctgatttatccgatgtgacgattgacctaatagaaaacatcagaggtaaaaaactatatgtaatcaagaatgaatatcagtatcagggaatgacttttaacgccgttggttcaccattagaaatgatggcaatgatgggaaaatcggtgtcagaaggcaagaaattatttattaacaccacatcccaaaaggcaaaaagtaagtacggcacaatcgctcttgagtcttatatttttggtctaaataaagaagcaaagatattaagaatagactctgaaaccactaaaaaccctgaacatccagcctataaaatcattgaccaagacttaaataatatcctcaaagattatgattatgtcattgcctcaccttgccttcaaacaggtgtcagtattaccttaaaagggcattttgaccagcaatttaacttttccagtggaaacattacacctcattgctttttacagcaaatgtggcggttgagggatgcagaaattgaaagattctattatgtgccgaactcatctaacctcaatctcattgggaataagtcaagttcaccatcagaccttctaaagagcaataacaagatggcaacggcaacggttaaccttttgggtagaatcgactccgaatattccctagagtatgaatcgcacggcatttggcttgagacgtgggcaaaattatcagcacggcataacagttcaatgcgttgttactctgaaattcttacctatctaattacgtctcaagggcataaattaaatatcaacattccctcacctcttgcagatattaagaagctaaatgatgaggtaagtagtaacagggaaaaggtaaaaaatgagagatactctcagaggttaaactcaccagatattaacgatgcagaagctaccatactcgaatctaaagagcaaaaaatcggattgactctcaatgagagatgcaccctagaaaagcataaagttaagaagcggtatgggaatgtaaagatggatattctcacctttgatgatgatggactataccccaaactcagactattttattacctcaccatcggtaaacctcatctcaaggctaatgacagaaaagctattgccaaaatgggcaatgacaataaaggcaagattctatcaaaagacttagttaataaaacttactccgctcgtgtgaaggtcttagagattcttaaactaactgactttatcgacaatcttagagatgaactcttaataactcccaataatccagctatcaccgattttaataatcttctgctaagagctaagaaggatttaagagtattaggagtcaacatcggaaaatatccaatggccaacattaatgccgtacttactctcattggtcacaaactttctgtaatgagagatgagttcggaaaagagaaaaggataaaagtagatggtaaatcataccgatgttatcaacttgaaacattaccagattttaccaatgatactcttgactactggttagaaaatgatagccaaaaagaagtaacagcaacagaaaattactccgaaaattttaacccttcaaatagctacaatccagacagtaagacactttcagagggtgcaaatttcctatatataaataaagaagaattgcatccaaataaattgcacctagaaataaaagaaggtgctgaactttttttattcggggtaaaggtgattgtgaaaggaatcttggacggggcagtaactatattctctatgggtcaagaatacgatttatccctcaatgaactagaggggatgttaacatcatgaactttacaagaatctttttaaagggcgatcgcaccatgttaaatgatggtacatttgttcagatatttgatatttaccatgaccacgcattgggagtgacccttgaccttaagacagaaaaaattatttccgatgatgttagggtaattactgtcaaagacttattgttcgatggcacttataaaggggtaaaatcttttatgcccgataatgcccgataatgcccgattgatgctacaaaatcccataatcataagcgataatcccctaatagcttgtaattcttgaaccgtagcgattttagagtattccaaaaagaagaaataaacaccgcaaaatgtcgtatttcacatatataaaccaaggttttttgccctaaaatctttatgtttgtagtgtgatgttgggtcaaaatggtcagaaaagttgcaaggtttttatggatgcttacgcgcgcgaggggtaagcatccccaaatagttactttatcctagtccatgcccatttattgccgtcccgttcggctttaaaaaagtgccaaaactcacaaggtgcaataaaaagttctgtacctttcgcaaccctagataatctttcaacagttactttttttcctattatctcggtacaaagtttggctagtttctcttttccctctttttcaatcaagccttcttgtatgcccaactcattgattaatctctctatttttaccattatttcccgttcaggtagtttatcccctaaatcttcatcggggggcaatgtagggcattctgaaggggctttttcttctgtctggacattatctaatattgaagtaaccaaactatcttcagttttttctattcctattaattcatattcggttactgtatccgtatcaatatccgaataactatctttatccgtattagctattcggttaagtttatccgttaactcagaaacaagactatatagcggttttagcttttcttctatcctgttatctaatacggataagtttatacggttatcattatccgtattagtatcattgggcttttttggtagttctaccccctcataaaccgcttttattcccaattccaacagactgataacagtatcctttataatgggttttttgctgatatggtgaacttttgccccttccatcattgcgatactttctatctcactcatcaacttatcgcttaagtgaatctcgtatctgtttaatcccttactggttttattcatatccgtttactttattcggttaacaattctattttatacgaataaaatattatacggttaactttatacgtttaactattttatctatacggataacagtaataagttattcgtattagttatacgtttacttttatccaaataaaattagtgcatttaaactaaaagaatgattttatcggagttgatagcattggattaacctaaagatgtttataagctatatctgataagtatttaaggttattttgttattctgtttattgacattatcagaataaaagaatagaatataattgttgagagataagaggtttaagtgattatggttaagaagttagttggttatgtcagggtcagtagtgaatcgcaagaggataacactagcttacagaatcagatagagagaattgaagcatattgtatggcttttggttatgagttggtaaaaatattcaaagaggttgccactggtacaaaagcagatattgaaacccgtcctatttttaatgaagctatagaatacttgaaacaggataatgctaatggaattattgccttgaagctagaccgaatcgcacggaatgctttagatgtattgcgtttggttcgtgaaaccttagaaccacaaaataaaatgttagtgttactagatattcaggtagatacttcgacaccttcaggaaaaatgattttaactgtaatgagtgccgttgctgaactcgaaagagacatgatctatgatcgcactcaggggggtagaaagactaaagcccaaaagggcgggtatgcctacgggaaacctaaatttggctataagactgaagaaaaggaactaaaagaagattcagcacaacaggaaactattaaactaattaagagacaccgtaggtcagggaaaagctaccagaaaatagctgattatctcaatgcccaaagtattcccactaaacaaggtaagaaatggagttctagcgtcgtctatcgaatctgtcaggaaaaagctggttaagtctgtttatagatatttagaatttattgaataaaaatagtatgaacaataaatatttatggactaaccacgctcggaaacgtttaactgaacgatgggaaataaaagaatcatgggttattgataccatcgaaaatcctgaacgttcagaatttattgttgatgagtcaggggaaaaatatcattactataaaagaatagctaagtttaagaatagagtgttagaagtgataacttctgccaactcaacacccacaagaataataaccttttactttaaccgtaacatgaggaaaaatttatgattgttacttacgataatgaagttgacgcaatttattttaagttaacggaaaataaaattgatagcaccgaacctcaaacagacaggattatcattgattacgatgaaagtaataatattgttggcattgaggtattagattttaattatcttgtcaagaaaggtttaaccgttgctgatttacctttttctgaagatgaaagattaacagcttctcaatattttaattttcctgttgctatctaatccagaaggggcaataatccccttctttcatcgagttagacttaatatcacaaaagtcattttcattttaccgtttcttttccacagcgtccgtacgcccctcgttaaatctcaaaaccgacaatttatgatgtttataaaaagttactcactttaataagtatttatactcattaaagggttattctttttttgtagcctgataggttgggaaggaatatttcagattatcagatttgttgaatatttttcgtcagatacgcaaaccttacaaacataattaacaactgaaactattgatatgtctaggttttagctctatcacaggttggatctg

SEQ ID NO: 105 - DNA, 13115 bp, Cyanobacterium sp. ABICyano1
tcgactggtcaagttactatatgtttagaaacaacaaaaaaagaagtcattataaaaataattgatacaggaattggcattaataaagaagaacaaaaattaatttttaatcgtttttatcgaatcaataaagcaagaaatagagagaaaggcagttgcggattaggtttagctattgcaaatgcgatcgcgcttaatcatggtggtagaataattttagaaagtcaagaaaatcaaggcagtatttttaccgtttatttaccgaaaatcatttcatcctaatttcatattcttttgacagaatcaaaggtaaagataaaaagagagaaacagtcatgaattcttataccgtgggtacttatttagccgaacgcttagtgcaaattggtttaaaacatcattttgccgtggctggggactataatttagtgttattggataacttattattaaataaaaacatggaacaagtgtattgttgtaatgaattaaattgtggtttttctgctgaaggttatgctagagctaaaggtgcagctgctgctgttgttacttattctgtgggtgctttatctgcttttgatgctattggtggtgcttatgccgaaaatttacccgtgattttaatttctggtgcccctaataataatgatcatgccgctggacatgttttacatcatgccttaggtaaaaccgattatcattatcaattagaaatggccaaaaatattactgctgctgccgaagctatttatactcctgaagaagcccctgccaaaattgatcatgtgattaaaaccgccttacgcgaaaaaaaacccgtgtatttagaaattgcctgtaatattgcttctatgccttgtgctgctcctgggcctgcttctgctttatttaatgatgaagcctctgatgaagctagtttaaatgctgccgtggaagaaaccttaaaatttattgccaatcgcgataaagttgccgtgttagttggttctaaattaagagctgctggtgctgaagaagctgctgttaaatttgctgatgctttaggtggtgcagttgctactatggctgctgccaaatctttttttcccgaagaaaatccccattatattggaactagttggggagaagtttcttatcctggtgtggaaaaaactatgaaagaagccgacgctgttattgctttagcccctgtgtttaatgattattctaccactggttggactgatattcccgatcccaaaaaattagttttagccgaacctcgttctgttgttgttaatggtgttcgctttccctctgtgcatttaaaagattatttaacccgcttagcccaaaaagtttctaaaaaaactggtgccttagatttttttaaatctttaaatgcgggtgaattaaaaaaagctgctcctgctgatccttctgctcctttagttaatgctgaaattgcccgtcaagttgaagccttattaacccctaatactaccgttattgccgaaactggtgattcttggtttaatgcccaacgcatgaaattacctaatggtgcccgtgttgaatatgaaatgcaatggggtcatattggttggtctgtacctgctgcttttggttatgctgttggtgctcctgaacgtcgtaatattttaatggtgggtgatggttcttttcaattaactgcccaagaagttgcccaaatggttcgcttaaaattacccgttattatttttttaataaataattatggttataccattgaagtgatgattcatgatgggccatataataatattaaaaattgggattatgcgggtttaatggaagtgtttaatggtaatggtggttatgattctggtgctggtaaaggtttaaaagccaaaactggtggtgaattagctgaagctattaaagttgccttagccaatactgatgggccaaccttaattgaatgttttattggtcgcgaagattgtaccgaagaattagttaaatggggtaaacgtgttgctgctgctaattctcgcaaacccgtgaataaattattgtaaggatccagcaagtttcatcccgaccccctcagggtcgggatttttttattgtgagctcaactttagatattcgtagttggcaatgtcgtaaatgcggaacaatacatggaaaacatatagatttgtaatgagaaaaagtgtaaacaaatattaagaaaaagatcagaaaaatttaacaacacgtaataaaaaaatgcgtcactacgggttataaatttacatgaaaggttaaaacacttttctgagacgattttgataaaaaagttgtcaaaaaattaagtttctttacaaatgcttaacaaaaacttggttttaagcacaaaataagagagactaatttgcagaagttttacaaggaaatcttgaagaaaaagatctaagtaaaacgactctgtttaaccaaaatttaacaaatttaacaaaacaaactaaatctattaggagattaactacatatgatccgtgcttatgcagctcaggagaaaggaggtaaattagaaccctttgattatgaccctggtattttagcagacgaagacgttgagattgctgttgagtactgtggaatttgtcattccgatttatctatgctcgataatgactggggtttaactacttaccctttcgttcccggtcacgaggttgtaggaaccattgctgcattaggagccaaagtaaaagaactcaaattgggtcagcgtgtaggattaggatggttcagtcgttcttgttctacctgtgagacttgtatgtctggtgatcaaaatttatgtgcaaccgctgaaggtactattgtaggaagacatggtggatttgctgagcgtgttcgtgctcaccattcttggttagtacctttacccgatcaattagacgcagctaaagccggtcctttattttgtggtggtatcactgtatttaatcctatcgttcagttcaacatcaaacctaccgcacgtgtaggtgttatcggaatcggaggtttaggtcacattgctctcaaatttttaaaagcatggggttgtgaggtaactgcctttagttcttctcctgacaaagaaaccgaagctaaagagttaggtgcaacccattttattaactctcgtgatcctgaagcattacaaagtgttcagaactatttcgactttattattagtactgtaaatgtaaacttagattggggattatacattgcttgtttacgtcctaaaggaagattacacattgtaggtgcagtattagagcctatggctacttatgcattccctttaatcatgggacagaaatctattagtggatctcccttaggatctcctagtactgtttctaaaatgatcgagtttgcttcccgtcatggtatcgagcccgttaccgaaacttaccccatttctcgtgttaacgaagcaatggagaaattaagaactggtcagcccaaatacagattggttctccaaattaaataactagatctacttctaaactgaaacaaatttgagggtaggcttcattgtctgcccttatttttttatttaggaaaagtgaacagactaaagagtgttggctctattgctttgagtatgtaaattaggcgttgctgaattaaggtatgatttttgacccctgcaggatcatcttgctgaaaaactcgagcgctcgttccgcaaagcggtacggagttagttaggggctaatgggcattctcccgtacaggaaagagttagaagttattaattatcaacaattctcctttgcctagtgcatcgttacctttttaattaaaacataaggaaaactaataatcgtaataatttaacctcaaagtgtaaagaaatgtgaaattctgacttttataacgttaaagagggaaaaattagcagtttaaaatacctagagaatagtctggggtaagcatagagaattagattagttaagttaatcaaattcagaaaaaataataatcgtaaatagttaatctgggtgtatagaaaatgatccccttcatgataagatttaaactcgaaaagcaaaagccaaaaaactaacttccattaaaagaagttgttacatataacgctataaagaaaatttatatatttggaggataccaaccatgtctcatattcaacgtgaaactagttgttctcgccctcgtttaaattctaatatggatgccgatttatatggttataaatgggctcgtgataatgttggtcaatctggtgctactatttatcgtttatatggtaaacctgatgctcctgaattattcttgaaacatggtaaaggttctgttgctaatgatgttactgatgaaatggttcgtttaaactggttgactgaatttatgcctttacctactattaaacattttattcgtactcccgatgatgcttggttattaactactgctattcctggtaaaactgcttttcaagttttagaagaatatcctgattctggtgaaaatattgttgatgctttagctgtttttttacgtcgtttacattctattcccgtttgtaattgtccttttaattctgatcgtgtttttcgtttagctcaagctcaatctcgtatgaataatggtttagttgatgcttctgattttgatgatgaacgtaatggttggcctgttgaacaagtttggaaagaaatgcacaaattgttacctttttctcctgattctgttgttactcatggtgatttttctttagataatttgatctttgatgaaggtaaattgattggttgtattgatgttggtcgtgttggtattgctgatcgttatcaagatttagctattttatggaattgtttaggtgaattttctccttctttacagaaacgtttatttcagaaatatggtattgataatcctgatatgaacaagttacaatttcatttaatgttggacgagttcttttaagaattaattcatgaccaaaatcccttaacgtgagttttcgttccactgagcgtcagaccccgtagaaaagatcaaaggatcttcttgagatcctttttttctgcgcgtaatctgctgctatttaaattacgtacacgtgttattactttgttaacgacaattgtcttaattaactgggcctcatgggccttccgctcactgcccgctttccagtcgggaaacctgtcgtgccagctctgcagatgacggtgaaaacctctgacacatgcagctcccggagacggtcacagcttgtctgtaagcggatgccgggagcagacaagcccgtcagggcgcgtcagcgggtgttggcgggtgtcggggcgcagccatgacccagtcacgtagcgatagcggagtgtatactggcttaactatgcggcatcagagcagattgtactgagagtgcaccatatgcggtgtgaaataccgcacagatgcgtaaggagaaaataccgcatcaggcgctcttccgcttcctcgctcactgactcgctgcgctcggtcgttcggctgcggcgagcggtatcagctcactcaaaggcggtaatacggttatccacagaatcaggggataacgcaggaaagaacatgtgagcaaaaggccagcaaaaggccaggaaccgtaaaaaggccgcgttgctggcgtttttccataggctccgcccccctgacgagcatcacaaaaatcgacgctcaagtcagaggtggcgaaacccgacaggactataaagataccaggcgtttccccctggaagctccctcgtgcgctctcctgttccgaccctgccgcttaccggatacctgtccgcctttctcccttcgggaagcgtggcgctttctcatagctcacgctgtaggtatctcagttcggtgtaggtcgttcgctccaagctgggctgtgtgcacgaaccccccgttcagcccgaccgctgcgccttatccggtaactatcgtcttgagtccaacccggtaagacacgacttatcgccactggcagcagccactggtaacaggattagcagagcgaggtatgtaggcggtgctacagagttcttgaagtggtggcctaactacggctacactagaaggacagtatttggtatctgcgctctgctgaagccagttaccttcggaaaaagagttggtagctcttgatccggcaaacaaaccaccgctggtagcggtggtttttttgtttgcaagcagcagattacgcgcagaaaaaaaggatctcaagaagatcctttgatcttttctactgcagaagcttgttagacaccctgtcatgtattttatattatttatttcaccatacggattaagtgaaacctaatgaaaatagtactttcggagctttaactttaatgaaggtatgtttttttatagacatcgatgtctggtttaacaataggaaaaagtagctaaaactcccatgaattaaagaaataacaaggtgtctaacaacctgttattaagaatgttagaaaagacttaacatttgtgttgagtttttatagacattggtgtctagacatacggtagataaggtttgctcaaaaataaaataaaaaaagattggactaaaaaacatttaatttagtacaatttaattagttattttttcgtctcaaattttgctttgttgagcagaaatttagataaaaaaatccccgtgatcagattacaatgtcgttcattgtacgatgtgtcgaaaaatctttacgacactctaaactgaccacacgggggaaaaagaaaactgaactaataacatcatgatactcggaaaacctagcaattctcaacccctaaacaaaagaaacttccaaaaccctgaccatataaaggagtggcaacaatcagcaatcagtcaagatttgatagcagaaaatcttgtatcggttgctaatggttttgatgtactatttatcggcaataaataccgaactaacacgggtgttctgtcacggcacatattaaactcctattctcatttagaagatggtggttcgtatggtagaacatttgacccatttaccaataaagaaatgcagtgggttcaatttaaaccgaatagaccaagaaaaggttctactggtaaggtaatcaaatatgaatcgccaaaaggtgaacctacaagagttctaatgccgtttgtgcctatgaaaatatggcaacggattagcgataagttcggagtaccgattaatccgaaaaaagatactcacttttgggaatgggtaaagaataatccatcgataccgattgccattacagaaggaaataaaaaagctaattgcctattatcctatggctatcctgctattgcctttgtaggcatttggaacggattagagaaaataaatgatttctcgaaggaaaagcagttaaaagaggatttgaaatggttgttatccaacggcaaccgaaatattaatatcatctttgaccaagaccagaaacaaaaaactgtaattaatgtaaacaaagctattttcgctttatcttctctaataagtagaaatggtcataaagttaatattgtgcaatggttgccgtcaaaaggtaaaggaatagatgattatttggtagctttaccttttgagaaaagagaaaatcatttagacaacttaattaaaattgcaccatcatttaatttttggtcaactaaatacttattcaagtgtcgtaaaccagatttaaccgtaaattgccgttatttgagcgatgcagtaaaagaattacctcaagaggatatagcattaatagcacctcacggcacgggtaaaacttcattagtagctactcacgttaagaatcggagttatcacggaaggaaaactatttcattggtgcatcttgaaagtttagccaaagctaatggcaacgcacttggattatattaccgaaccgaaaataatattgaaaagcaatatcttggatttagcttatgtgtagatagttgccgtgataagattaacggcattacaactgatattatttcaggtcaagattattgccttttcattgatgaaattgaccaagtaattccacacatccttaacagtgaaactgaagtaagtaagtatagatgcaccatcattgacactttttctgaactggtgagaaatgctgaacaggtcattattgctgatgctgatttatccgatgtgacgattgacctaatagaaaacatcagaggtaaaaaactatatgtaatcaagaatgaatatcagtatcagggaatgacttttaacgccgttggttcaccattagaaatgatggcaatgatgggaaaatcggtgtcagaaggcaagaaattatttattaacaccacatcccaaaaggcaaaaagtaagtacggcacaatcgctcttgagtcttatatttttggtctaaataaagaagcaaagatattaagaatagactctgaaaccactaaaaaccctgaacatccagcctataaaatcattgaccaagacttaaataatatcctcaaagattatgattatgtcattgcctcaccttgccttcaaacaggtgtcagtattaccttaaaagggcattttgaccagcaatttaacttttccagtggaaacattacacctcattgctttttacagcaaatgtggcggttgagggatgcagaaattgaaagattctattatgtgccgaactcatctaacctcaatctcattgggaataagtcaagttcaccatcagaccttctaaagagcaataacaagatggcaacggcaacggttaaccttttgggtagaatcgactccgaatattccctagagtatgaatcgcacggcatttggcttgagacgtgggcaaaattatcagcacggcataacagttcaatgcgttgttactctgaaattcttacctatctaattacgtctcaagggcataaattaaatatcaacattccctcacctcttgcagatattaagaagctaaatgatgaggtaagtagtaacagggaaaaggtaaaaaatgagagatactctcagaggttaaactcaccagatattaacgatgcagaagctaccatactcgaatctaaagagcaaaaaatcggattgactctcaatgagagatgcaccctagaaaagcataaagttaagaagcggtatgggaatgtaaagatggatattctcacctttgatgatgatggactataccccaaactcagactattttattacctcaccatcggtaaacctcatctcaaggctaatgacagaaaagctattgccaaaatgggcaatgacaataaaggcaagattctatcaaaagacttagttaataaaacttactccgctcgtgtgaaggtcttagagattcttaaactaactgactttatcgacaatcttagagatgaactcttaataactcccaataatccagctatcaccgattttaataatcttctgctaagagctaagaaggatttaagagtattaggagtcaacatcggaaaatatccaatggccaacattaatgccgtacttactctcattggtcacaaactttctgtaatgagagatgagttcggaaaagagaaaaggataaaagtagatggtaaatcataccgatgttatcaacttgaaacattaccagattttaccaatgatactcttgactactggttagaaaatgatagccaaaaagaagtaacagcaacagaaaattactccgaaaattttaacccttcaaatagctacaatccagacagtaagacactttcagagggtgcaaatttcctatatataaataaagaagaattgcatccaaataaattgcacctagaaataaaagaaggtgctgaactttttttattcggggtaaaggtgattgtgaaaggaatcttggacggggcagtaactatattctctatgggtcaagaatacgatttatccctcaatgaactagaggggatgttaacatcatgaactttacaagaatctttttaaagggcgatcgcaccatgttaaatgatggtacatttgttcagatatttgatatttaccatgaccacgcattgggagtgacccttgaccttaagacagaaaaaattatttccgatgatgttagggtaattactgtcaaagacttattgttcgatggcacttataaaggggtaaaatcttttatgcccgataatgcccgataatgcccgattgatgctacaaaatcccataatcataagcgataatcccctaatagcttgtaattcttgaaccgtagcgattttagagtattccaaaaagaagaaataaacaccgcaaaatgtcgtatttcacatatataaaccaaggttttttgccctaaaatctttatgtttgtagtgtgatgttgggtcaaaatggtcagaaaagttgcaaggtttttatggatgcttacgcgcgcgaggggtaagcatccccaaatagttactttatcctagtccatgcccatttattgccgtcccgttcggctttaaaaaagtgccaaaactcacaaggtgcaataaaaagttctgtacctttcgcaaccctagataatctttcaacagttactttttttcctattatctcggtacaaagtttggctagtttctcttttccctctttttcaatcaagccttcttgtatgcccaactcattgattaatctctctatttttaccattatttcccgttcaggtagtttatcccctaaatcttcatcggggggcaatgtagggcattctgaaggggctttttcttctgtctggacattatctaatattgaagtaaccaaactatcttcagttttttctattcctattaattcatattcggttactgtatccgtatcaatatccgaataactatctttatccgtattagctattcggttaagtttatccgttaactcagaaacaagactatatagcggttttagcttttcttctatcctgttatctaatacggataagtttatacggttatcattatccgtattagtatcattgggcttttttggtagttctaccccctcataaaccgcttttattcccaattccaacagactgataacagtatcctttataatgggttttttgctgatatggtgaacttttgccccttccatcattgcgatactttctatctcactcatcaacttatcgcttaagtgaatctcgtatctgtttaatcccttactggttttattcatatccgtttactttattcggttaacaattctattttatacgaataaaatattatacggttaactttatacgtttaactattttatctatacggataacagtaataagttattcgtattagttatacgtttacttttatccaaataaaattagtgcatttaaactaaaagaatgattttatcggagttgatagcattggattaacctaaagatgtttataagctatatctgataagtatttaaggttattttgttattctgtttattgacattatcagaataaaagaatagaatataattgttgagagataagaggtttaagtgattatggttaagaagttagttggttatgtcagggtcagtagtgaatcgcaagaggataacactagcttacagaatcagatagagagaattgaagcatattgtatggcttttggttatgagttggtaaaaatattcaaagaggttgccactggtacaaaagcagatattgaaacccgtcctatttttaatgaagctatagaatacttgaaacaggataatgctaatggaattattgccttgaagctagaccgaatcgcacggaatgctttagatgtattgcgtttggttcgtgaaaccttagaaccacaaaataaaatgttagtgttactagatattcaggtagatacttcgacaccttcaggaaaaatgattttaactgtaatgagtgccgttgctgaactcgaaagagacatgatctatgatcgcactcaggggggtagaaagactaaagcccaaaagggcgggtatgcctacgggaaacctaaatttggctataagactgaagaaaaggaactaaaagaagattcagcacaacaggaaactattaaactaattaagagacaccgtaggtcagggaaaagctaccagaaaatagctgattatctcaatgcccaaagtattcccactaaacaaggtaagaaatggagttctagcgtcgtctatcgaatctgtcaggaaaaagctggttaagtctgtttatagatatttagaatttattgaataaaaatagtatgaacaataaatatttatggactaaccacgctcggaaacgtttaactgaacgatgggaaataaaagaatcatgggttattgataccatcgaaaatcctgaacgttcagaatttattgttgatgagtcaggggaaaaatatcattactataaaagaatagctaagtttaagaatagagtgttagaagtgataacttctgccaactcaacacccacaagaataataaccttttactttaaccgtaacatgaggaaaaatttatgattgttacttacgataatgaagttgacgcaatttattttaagttaacggaaaataaaattgatagcaccgaacctcaaacagacaggattatcattgattacgatgaaagtaataatattgttggcattgaggtattagattttaattatcttgtcaagaaaggtttaaccgttgctgatttacctttttctgaagatgaaagattaacagcttctcaatattttaattttcctgttgctatctaatccagaaggggcaataatccccttctttcatcgagttagacttaatatcacaaaagtcattttcattttaccgtttcttttccacagcgtccgtacgcccctcgttaaatctcaaaaccgacaatttatgatgtttataaaaagttactcactttaataagtatttatactcattaaagggttattctttttttgtagcctgataggttgggaaggaatatttcagattatcagatttgttgaatatttttcgtcagatacgcaaaccttacaaacataattaacaactgaaactattgatatgtctaggttttagctctatcacaggttggatctg

SEQ ID NO: 106 - DNA, 14725 bp, Cyanobacterium sp. ABICyano1
tcgacaattaataacttcttcctgtacgggcgaatggccatttgctcctaactaactccgtactgctttgcggaacgagcgtagcgaactctccgaattactaagccttcatccctgatagatgcaaaaaacgaattaaaattatgtgtaaaaagaaaatgtgtctttatttagtagtcaaagttacaaaatattaagaatcaaattaataatgtattgggcagttaagtatataagtctttaaatatttatttgtattcaatatattaaccgaggacaaattatgaattcttacactgttggaacctatttagcagaacgtttagttcaaattggtctcaaacaccattttgcagtagctggtgattataatttagttttattggataacttattgttaaataagaatatggaacaagtgtattgttgtaatgaattaaactgtggtttttctgctgagggatatgctcgtgcaaaaggtgctgccgcagcagttgttacttattctgttggagcattaagtgcttttgacgctattggaggtgcttatgcagaaaatttacctgtaatcttaatctctggtgcacccaataacaacgatcacgctgctggtcatgtattgcatcatgctttaggtaaaaccgattatcattaccaattagaaatggcaaaaaatattaccgctgccgcagaagctatttatactcccgaagaagcacctgctaagatcgatcacgtaattaaaaccgctctccgtgagaaaaaacccgtatatttagaaatcgcttgcaatatcgcttctatgccttgtgcagctcctggacctgctagtgctttatttaacgatgaagcatctgatgaggctagtttaaatgccgctgttgaagaaactttgaaatttattgctaatcgtgataaagtagctgttttagttggttctaaactccgtgccgctggtgcagaagaagcggctgtaaaattcgcagatgccttaggaggtgctgttgccacaatggcagccgctaaaagttttttccccgaagaaaatcctcattacattggtacttcttggggtgaggtatcttaccctggtgtagaaaaaaccatgaaggaagctgatgcagtaattgcattagctcctgttttcaatgattactctaccactggttggactgatattccagaccccaaaaaattagttttagcagaacctcgctctgtagttgtgaatggtgttagatttcccagtgtacatctcaaagattatttaactcgtttagctcaaaaagtgagtaaaaagactggcgcactcgatttctttaaatctttaaatgctggtgaattaaagaaagcagctcctgctgatcccagtgctcctttagtgaatgccgaaatcgcaagacaagttgaagccttgttaactcctaacactaccgttattgccgagactggtgatagttggttcaatgctcaacgcatgaaattacccaatggtgctcgtgttgagtatgaaatgcaatggggtcacattggatggtctgttcctgctgcatttggatatgcagttggagcacctgagcgtagaaacattttaatggtaggtgatggttctttccaactcactgctcaagaagttgcacaaatggtacgtttaaaattgcctgttattatctttctcattaacaactatggttacaccattgaagttatgattcatgatggtccttataataacattaagaattgggattacgcaggtttaatggaggtatttaacggtaatggtggatacgacagtggagcaggtaaaggattaaaagctaaaacaggaggtgagttagctgaagcaattaaagtagctttagccaatacagatggtcctaccttaatcgaatgtttcattggacgtgaagattgtactgaagagttagttaaatggggaaagcgtgttgccgctgcaaattctcgtaaacctgtaaacaaactcttgtagttaggatccagcaaggtttcatcccgaccccctcagggtcgggatttttttattgtgagctctgacataagtaaaggcatcccctgcgtgatataattaccttcagtttaaggaggtatacacatatgattaaagcctacgctgccctggaagccaacggaaaactccaaccctttgaatacgaccccggtgccctgggtgctaatgaggtggagattgaggtgcagtattgtggggtgtgccacagtgatttgtccatgattaataacgaatggggcatttccaattaccccctagtgccgggtcatgaggtggtgggtactgtggccgccatgggcgaaggggtgaaccatgttgaggtgggggatttagtggggctgggttggcattcgggctactgcatgacctgccatagttgtttatctggctaccacaacctttgtgccacggcggaatcgaccattgtgggccactacggtggctttggcgatcgggttcgggccaagggagtcagcgtggtgaaattacctaaaggcattgacctagccagtgccgggccccttttctgtggaggaattaccgttttcagtcctatggtggaactgagtttaaagcccactgcaaaagtggcagtgatcggcattgggggcttgggccatttagcggtgcaatttctccgggcctggggctgtgaagtgactgcctttacctccagtgccaggaagcaaacggaagtgttggaattgggcgctcaccacatactagattccaccaatccagaggcgatcgccagtgcggaaggcaaatttgactatattatctccactgtgaacctgaagcttgactggaacttatacatcagcaccctggcgccccagggacatttccactttgttggggtggtgttggagcctttggatctaaatctttttccccttttgatgggacaacgctccgtttctgcctccccagtgggtagtcccgccaccattgccaccatgttggactttgctgtgcgccatgacattaaacccgtggtggaacaatttagctttgatcagatcaacgaggcgatcgcccatctagaaagcggcaaagcccattatcgggtagtgctcagccatagtaaaaattagctctgcaaaggttgcttctagatctgtggaacgcccggttgccaccgggcgttttttattcctgcaggaatatctcatccttagcttctacttataccttcagcatagttaaaaatcatccctttattgatggtaataaaagaacaggttttattagtggagtaacctttttaatgctcaatggttctcactttactgcttctgaagtggaagtagtacatatcatccaaaccttagctagtggcagaattaccgaggaagaattacaacaatggttcgtaaggaaaagtaagcagatgaataattaaagcatcatttcatcctcatttcatattctcctgtcaccatggtatggaagattaggtaaaaatgaggaaaaagtttattatgaattcttataccgtgggtacttatttagccgaacgcttagtgcaaattggtttaaaacatcattttgccgtggctggggactataatttagtgttattggataacttattattaaataaaaacatggaacaagtgtattgttgtaatgaattaaattgtggtttttctgctgaaggttatgctagagctaaaggtgcagctgctgctgttgttacttattctgtgggtgctttatctgcttttgatgctattggtggtgcttatgccgaaaatttacccgtgattttaatttctggtgcccctaataataatgatcatgccgctggacatgttttacatcatgccttaggtaaaaccgattatcattatcaattagaaatggccaaaaatattactgctgctgccgaagctatttatactcctgaagaagcccctgccaaaattgatcatgtgattaaaaccgccttacgcgaaaaaaaacccgtgtatttagaaattgcctgtaatattgcttctatgccttgtgctgctcctgggcctgcttctgctttatttaatgatgaagcctctgatgaagctagtttaaatgctgccgtggaagaaaccttaaaatttattgccaatcgcgataaagttgccgtgttagttggttctaaattaagagctgctggtgctgaagaagctgctgttaaatttgctgatgctttaggtggtgcagttgctactatggctgctgccaaatctttttttcccgaagaaaatccccattatattggaactagttggggagaagtttcttatcctggtgtggaaaaaactatgaaagaagccgacgctgttattgctttagcccctgtgtttaatgattattctaccactggttggactgatattcccgatcccaaaaaattagttttagccgaacctcgttctgttgttgttaatggtgttcgctttccctctgtgcatttaaaagattatttaacccgcttagcccaaaaagtttctaaaaaaactggtgccttagatttttttaaatctttaaatgcgggtgaattaaaaaaagctgctcctgctgatccttctgctcctttagttaatgctgaaattgcccgtcaagttgaagccttattaacccctaatactaccgttattgccgaaactggtgattcttggtttaatgcccaacgcatgaaattacctaatggtgcccgtgttgaatatgaaatgcaatggggtcatattggttggtctgtacctgctgcttttggttatgctgttggtgctcctgaacgtcgtaatattttaatggtgggtgatggttcttttcaattaactgcccaagaagttgcccaaatggttcgcttaaaattacccgttattatttttttaataaataattatggttataccattgaagtgatgattcatgatgggccatataataatattaaaaattgggattatgcgggtttaatggaagtgtttaatggtaatggtggttatgattctggtgctggtaaaggtttaaaagccaaaactggtggtgaattagctgaagctattaaagttgccttagccaatactgatgggccaaccttaattgaatgttttattggtcgcgaagattgtaccgaagaattagttaaatggggtaaacgtgttgctgctgctaattctcgcaaacccgtgaataaattattgtaatttttggggatcaattcgagctcagcaagtttcatcccgaccccctcagggtcgggatttttttattgtactcgagcgctcgttccgcaaagcggtacggagttagttaggggctaatgggcattctcccgtacaggaaagagttagaagttattaattatcaacaattctcctttgcctagtgcatcgttacctttttaattaaaacataaggaaaactaataatcgtaataatttaacctcaaagtgtaaagaaatgtgaaattctgacttttataacgttaaagagggaaaaattagcagtttaaaatacctagagaatagtctggggtaagcatagagaattagattagttaagttaatcaaattcagaaaaaataataatcgtaaatagttaatctgggtgtatagaaaatgatccccttcatgataagatttaaactcgaaaagcaaaagccaaaaaactaacttccattaaaagaagttgttacatataacgctataaagaaaatttatatatttggaggataccaaccatgtctcatattcaacgtgaaactagttgttctcgccctcgtttaaattctaatatggatgccgatttatatggttataaatgggctcgtgataatgttggtcaatctggtgctactatttatcgtttatatggtaaacctgatgctcctgaattattcttgaaacatggtaaaggttctgttgctaatgatgttactgatgaaatggttcgtttaaactggttgactgaatttatgcctttacctactattaaacattttattcgtactcccgatgatgcttggttattaactactgctattcctggtaaaactgcttttcaagttttagaagaatatcctgattctggtgaaaatattgttgatgctttagctgtttttttacgtcgtttacattctattcccgtttgtaattgtccttttaattctgatcgtgtttttcgtttagctcaagctcaatctcgtatgaataatggtttagttgatgcttctgattttgatgatgaacgtaatggttggcctgttgaacaagtttggaaagaaatgcacaaattgttacctttttctcctgattctgttgttactcatggtgatttttctttagataatttgatctttgatgaaggtaaattgattggttgtattgatgttggtcgtgttggtattgctgatcgttatcaagatttagctattttatggaattgtttaggtgaattttctccttctttacagaaacgtttatttcagaaatatggtattgataatcctgatatgaacaagttacaatttcatttaatgttggacgagttcttttaagaattaattcatgaccaaaatcccttaacgtgagttttcgttccactgagcgtcagaccccgtagaaaagatcaaaggatcttcttgagatcctttttttctgcgcgtaatctgctgctatttaaattacgtacacgtgttattactttgttaacgacaattgtcttaattaactgggcctcatgggccttccgctcactgcccgctttccagtcgggaaacctgtcgtgccagctctgcagatgacggtgaaaacctctgacacatgcagctcccggagacggtcacagcttgtctgtaagcggatgccgggagcagacaagcccgtcagggcgcgtcagcgggtgttggcgggtgtcggggcgcagccatgacccagtcacgtagcgatagcggagtgtatactggcttaactatgcggcatcagagcagattgtactgagagtgcaccatatgcggtgtgaaataccgcacagatgcgtaaggagaaaataccgcatcaggcgctcttccgcttcctcgctcactgactcgctgcgctcggtcgttcggctgcggcgagcggtatcagctcactcaaaggcggtaatacggttatccacagaatcaggggataacgcaggaaagaacatgtgagcaaaaggccagcaaaaggccaggaaccgtaaaaaggccgcgttgctggcgtttttccataggctccgcccccctgacgagcatcacaaaaatcgacgctcaagtcagaggtggcgaaacccgacaggactataaagataccaggcgtttccccctggaagctccctcgtgcgctctcctgttccgaccctgccgcttaccggatacctgtccgcctttctcccttcgggaagcgtggcgctttctcatagctcacgctgtaggtatctcagttcggtgtaggtcgttcgctccaagctgggctgtgtgcacgaaccccccgttcagcccgaccgctgcgccttatccggtaactatcgtcttgagtccaacccggtaagacacgacttatcgccactggcagcagccactggtaacaggattagcagagcgaggtatgtaggcggtgctacagagttcttgaagtggtggcctaactacggctacactagaaggacagtatttggtatctgcgctctgctgaagccagttaccttcggaaaaagagttggtagctcttgatccggcaaacaaaccaccgctggtagcggtggtttttttgtttgcaagcagcagattacgcgcagaaaaaaaggatctcaagaagatcctttgatcttttctactgcagaagcttgttagacaccctgtcatgtattttatattatttatttcaccatacggattaagtgaaacctaatgaaaatagtactttcggagctttaactttaatgaaggtatgtttttttatagacatcgatgtctggtttaacaataggaaaaagtagctaaaactcccatgaattaaagaaataacaaggtgtctaacaacctgttattaagaatgttagaaaagacttaacatttgtgttgagtttttatagacattggtgtctagacatacggtagataaggtttgctcaaaaataaaataaaaaaagattggactaaaaaacatttaatttagtacaatttaattagttattttttcgtctcaaattttgctttgttgagcagaaatttagataaaaaaatccccgtgatcagattacaatgtcgttcattgtacgatgtgtcgaaaaatctttacgacactctaaactgaccacacgggggaaaaagaaaactgaactaataacatcatgatactcggaaaacctagcaattctcaacccctaaacaaaagaaacttccaaaaccctgaccatataaaggagtggcaacaatcagcaatcagtcaagatttgatagcagaaaatcttgtatcggttgctaatggttttgatgtactatttatcggcaataaataccgaactaacacgggtgttctgtcacggcacatattaaactcctattctcatttagaagatggtggttcgtatggtagaacatttgacccatttaccaataaagaaatgcagtgggttcaatttaaaccgaatagaccaagaaaaggttctactggtaaggtaatcaaatatgaatcgccaaaaggtgaacctacaagagttctaatgccgtttgtgcctatgaaaatatggcaacggattagcgataagttcggagtaccgattaatccgaaaaaagatactcacttttgggaatgggtaaagaataatccatcgataccgattgccattacagaaggaaataaaaaagctaattgcctattatcctatggctatcctgctattgcctttgtaggcatttggaacggattagagaaaataaatgatttctcgaaggaaaagcagttaaaagaggatttgaaatggttgttatccaacggcaaccgaaatattaatatcatctttgaccaagaccagaaacaaaaaactgtaattaatgtaaacaaagctattttcgctttatcttctctaataagtagaaatggtcataaagttaatattgtgcaatggttgccgtcaaaaggtaaaggaatagatgattatttggtagctttaccttttgagaaaagagaaaatcatttagacaacttaattaaaattgcaccatcatttaatttttggtcaactaaatacttattcaagtgtcgtaaaccagatttaaccgtaaattgccgttatttgagcgatgcagtaaaagaattacctcaagaggatatagcattaatagcacctcacggcacgggtaaaacttcattagtagctactcacgttaagaatcggagttatcacggaaggaaaactatttcattggtgcatcttgaaagtttagccaaagctaatggcaacgcacttggattatattaccgaaccgaaaataatattgaaaagcaatatcttggatttagcttatgtgtagatagttgccgtgataagattaacggcattacaactgatattatttcaggtcaagattattgccttttcattgatgaaattgaccaagtaattccacacatccttaacagtgaaactgaagtaagtaagtatagatgcaccatcattgacactttttctgaactggtgagaaatgctgaacaggtcattattgctgatgctgatttatccgatgtgacgattgacctaatagaaaacatcagaggtaaaaaactatatgtaatcaagaatgaatatcagtatcagggaatgacttttaacgccgttggttcaccattagaaatgatggcaatgatgggaaaatcggtgtcagaaggcaagaaattatttattaacaccacatcccaaaaggcaaaaagtaagtacggcacaatcgctcttgagtcttatatttttggtctaaataaagaagcaaagatattaagaatagactctgaaaccactaaaaaccctgaacatccagcctataaaatcattgaccaagacttaaataatatcctcaaagattatgattatgtcattgcctcaccttgccttcaaacaggtgtcagtattaccttaaaagggcattttgaccagcaatttaacttttccagtggaaacattacacctcattgctttttacagcaaatgtggcggttgagggatgcagaaattgaaagattctattatgtgccgaactcatctaacctcaatctcattgggaataagtcaagttcaccatcagaccttctaaagagcaataacaagatggcaacggcaacggttaaccttttgggtagaatcgactccgaatattccctagagtatgaatcgcacggcatttggcttgagacgtgggcaaaattatcagcacggcataacagttcaatgcgttgttactctgaaattcttacctatctaattacgtctcaagggcataaattaaatatcaacattccctcacctcttgcagatattaagaagctaaatgatgaggtaagtagtaacagggaaaaggtaaaaaatgagagatactctcagaggttaaactcaccagatattaacgatgcagaagctaccatactcgaatctaaagagcaaaaaatcggattgactctcaatgagagatgcaccctagaaaagcataaagttaagaagcggtatgggaatgtaaagatggatattctcacctttgatgatgatggactataccccaaactcagactattttattacctcaccatcggtaaacctcatctcaaggctaatgacagaaaagctattgccaaaatgggcaatgacaataaaggcaagattctatcaaaagacttagttaataaaacttactccgctcgtgtgaaggtcttagagattcttaaactaactgactttatcgacaatcttagagatgaactcttaataactcccaataatccagctatcaccgattttaataatcttctgctaagagctaagaaggatttaagagtattaggagtcaacatcggaaaatatccaatggccaacattaatgccgtacttactctcattggtcacaaactttctgtaatgagagatgagttcggaaaagagaaaaggataaaagtagatggtaaatcataccgatgttatcaacttgaaacattaccagattttaccaatgatactcttgactactggttagaaaatgatagccaaaaagaagtaacagcaacagaaaattactccgaaaattttaacccttcaaatagctacaatccagacagtaagacactttcagagggtgcaaatttcctatatataaataaagaagaattgcatccaaataaattgcacctagaaataaaagaaggtgctgaactttttttattcggggtaaaggtgattgtgaaaggaatcttggacggggcagtaactatattctctatgggtcaagaatacgatttatccctcaatgaactagaggggatgttaacatcatgaactttacaagaatctttttaaagggcgatcgcaccatgttaaatgatggtacatttgttcagatatttgatatttaccatgaccacgcattgggagtgacccttgaccttaagacagaaaaaattatttccgatgatgttagggtaattactgtcaaagacttattgttcgatggcacttataaaggggtaaaatcttttatgcccgataatgcccgataatgcccgattgatgctacaaaatcccataatcataagcgataatcccctaatagcttgtaattcttgaaccgtagcgattttagagtattccaaaaagaagaaataaacaccgcaaaatgtcgtatttcacatatataaaccaaggttttttgccctaaaatctttatgtttgtagtgtgatgttgggtcaaaatggtcagaaaagttgcaaggtttttatggatgcttacgcgcgcgaggggtaagcatccccaaatagttactttatcctagtccatgcccatttattgccgtcccgttcggctttaaaaaagtgccaaaactcacaaggtgcaataaaaagttctgtacctttcgcaaccctagataatctttcaacagttactttttttcctattatctcggtacaaagtttggctagtttctcttttccctctttttcaatcaagccttcttgtatgcccaactcattgattaatctctctatttttaccattatttcccgttcaggtagtttatcccctaaatcttcatcggggggcaatgtagggcattctgaaggggctttttcttctgtctggacattatctaatattgaagtaaccaaactatcttcagttttttctattcctattaattcatattcggttactgtatccgtatcaatatccgaataactatctttatccgtattagctattcggttaagtttatccgttaactcagaaacaagactatatagcggttttagcttttcttctatcctgttatctaatacggataagtttatacggttatcattatccgtattagtatcattgggcttttttggtagttctaccccctcataaaccgcttttattcccaattccaacagactgataacagtatcctttataatgggttttttgctgatatggtgaacttttgccccttccatcattgcgatactttctatctcactcatcaacttatcgcttaagtgaatctcgtatctgtttaatcccttactggttttattcatatccgtttactttattcggttaacaattctattttatacgaataaaatattatacggttaactttatacgtttaactattttatctatacggataacagtaataagttattcgtattagttatacgtttacttttatccaaataaaattagtgcatttaaactaaaagaatgattttatcggagttgatagcattggattaacctaaagatgtttataagctatatctgataagtatttaaggttattttgttattctgtttattgacattatcagaataaaagaatagaatataattgttgagagataagaggtttaagtgattatggttaagaagttagttggttatgtcagggtcagtagtgaatcgcaagaggataacactagcttacagaatcagatagagagaattgaagcatattgtatggcttttggttatgagttggtaaaaatattcaaagaggttgccactggtacaaaagcagatattgaaacccgtcctatttttaatgaagctatagaatacttgaaacaggataatgctaatggaattattgccttgaagctagaccgaatcgcacggaatgctttagatgtattgcgtttggttcgtgaaaccttagaaccacaaaataaaatgttagtgttactagatattcaggtagatacttcgacaccttcaggaaaaatgattttaactgtaatgagtgccgttgctgaactcgaaagagacatgatctatgatcgcactcaggggggtagaaagactaaagcccaaaagggcgggtatgcctacgggaaacctaaatttggctataagactgaagaaaaggaactaaaagaagattcagcacaacaggaaactattaaactaattaagagacaccgtaggtcagggaaaagctaccagaaaatagctgattatctcaatgcccaaagtattcccactaaacaaggtaagaaatggagttctagcgtcgtctatcgaatctgtcaggaaaaagctggttaagtctgtttatagatatttagaatttattgaataaaaatagtatgaacaataaatatttatggactaaccacgctcggaaacgtttaactgaacgatgggaaataaaagaatcatgggttattgataccatcgaaaatcctgaacgttcagaatttattgttgatgagtcaggggaaaaatatcattactataaaagaatagctaagtttaagaatagagtgttagaagtgataacttctgccaactcaacacccacaagaataataaccttttactttaaccgtaacatgaggaaaaatttatgattgttacttacgataatgaagttgacgcaatttattttaagttaacggaaaataaaattgatagcaccgaacctcaaacagacaggattatcattgattacgatgaaagtaataatattgttggcattgaggtattagattttaattatcttgtcaagaaaggtttaaccgttgctgatttacctttttctgaagatgaaagattaacagcttctcaatattttaattttcctgttgctatctaatccagaaggggcaataatccccttctttcatcgagttagacttaatatcacaaaagtcattttcattttaccgtttcttttccacagcgtccgtacgcccctcgttaaatctcaaaaccgacaatttatgatgtttataaaaagttactcactttaataagtatttatactcattaaagggttattctttttttgtagcctgataggttgggaaggaatatttcagattatcagatttgttgaatatttttcgtcagatacgcaaaccttacaaacataattaacaactgaaactattgatatgtctaggttttagctctatcacaggttggatctg

SEQ ID NO: 107 - DNA, 9185 bp, Cyanobacterium sp. ABICyano1
tcgacaattaataacttcttcctgtacgggcgaatggccatttgctcctaactaactccgtactgctttgcggaacgagcgtagcgaactctccgaattactaagccttcatccctgatagatgcaaaaaacgaattaaaattatgtgtaaaaagaaaatgtgtctttatttagtagtcaaagttacaaaatattaagaatcaaattaataatgtattgggcagttaagtatataagtctttaaatatttatttgtattcaatatattaaccgaggacaaattatgaattcttataccgtgggtacttatttagccgaacgcttagtgcaaattggtttaaaacatcattttgccgtggctggggactataatttagtgttattggataacttattattaaataaaaacatggaacaagtgtattgttgtaatgaattaaattgtggtttttctgctgaaggttatgctagagctaaaggtgcagctgctgctgttgttacttattctgtgggtgctttatctgcttttgatgctattggtggtgcttatgccgaaaatttacccgtgattttaatttctggtgcccctaataataatgatcatgccgctggacatgttttacatcatgccttaggtaaaaccgattatcattatcaattagaaatggccaaaaatattactgctgctgccgaagctatttatactcctgaagaagcccctgccaaaattgatcatgtgattaaaaccgccttacgcgaaaaaaaacccgtgtatttagaaattgcctgtaatattgcttctatgccttgtgctgctcctgggcctgcttctgctttatttaatgatgaagcctctgatgaagctagtttaaatgctgccgtggaagaaaccttaaaatttattgccaatcgcgataaagttgccgtgttagttggttctaaattaagagctgctggtgctgaagaagctgctgttaaatttgctgatgctttaggtggtgcagttgctactatggctgctgccaaatctttttttcccgaagaaaatccccattatattggaactagttggggagaagtttcttatcctggtgtggaaaaaactatgaaagaagccgacgctgttattgctttagcccctgtgtttaatgattattctaccactggttggactgatattcccgatcccaaaaaattagttttagccgaacctcgttctgttgttgttaatggtgttcgctttccctctgtgcatttaaaagattatttaacccgcttagcccaaaaagtttctaaaaaaactggtgccttagatttttttaaatctttaaatgcgggtgaattaaaaaaagctgctcctgctgatccttctgctcctttagttaatgctgaaattgcccgtcaagttgaagccttattaacccctaatactaccgttattgccgaaactggtgattcttggtttaatgcccaacgcatgaaattacctaatggtgcccgtgttgaatatgaaatgcaatggggtcatattggttggtctgtacctgctgcttttggttatgctgttggtgctcctgaacgtcgtaatattttaatggtgggtgatggttcttttcaattaactgcccaagaagttgcccaaatggttcgcttaaaattacccgttattatttttttaataaataattatggttataccattgaagtgatgattcatgatgggccatataataatattaaaaattgggattatgcgggtttaatggaagtgtttaatggtaatggtggttatgattctggtgctggtaaaggtttaaaagccaaaactggtggtgaattagctgaagctattaaagttgccttagccaatactgatgggccaaccttaattgaatgttttattggtcgcgaagattgtaccgaagaattagttaaatggggtaaacgtgttgctgctgctaattctcgcaaacccgtgaataaattattgtaaggatccagcaaggtttcatcccgaccccctcagggtcgggatttttttattgtgagctctgacataagtaaaggcatcccctgcgtgatataattaccttcagtttaaggaggtatacacatatgattaaagcctacgctgccctggaagccaacggaaaactccaaccctttgaatacgaccccggtgccctgggtgctaatgaggtggagattgaggtgcagtattgtggggtgtgccacagtgatttgtccatgattaataacgaatggggcatttccaattaccccctagtgccgggtcatgaggtggtgggtactgtggccgccatgggcgaaggggtgaaccatgttgaggtgggggatttagtggggctgggttggcattcgggctactgcatgacctgccatagttgtttatctggctaccacaacctttgtgccacggcggaatcgaccattgtgggccactacggtggctttggcgatcgggttcgggccaagggagtcagcgtggtgaaattacctaaaggcattgacctagccagtgccgggccccttttctgtggaggaattaccgttttcagtcctatggtggaactgagtttaaagcccactgcaaaagtggcagtgatcggcattgggggcttgggccatttagcggtgcaatttctccgggcctggggctgtgaagtgactgcctttacctccagtgccaggaagcaaacggaagtgttggaattgggcgctcaccacatactagattccaccaatccagaggcgatcgccagtgcggaaggcaaatttgactatattatctccactgtgaacctgaagcttgactggaacttatacatcagcaccctggcgccccagggacatttccactttgttggggtggtgttggagcctttggatctaaatctttttccccttttgatgggacaacgctccgtttctgcctccccagtgggtagtcccgccaccattgccaccatgttggactttgctgtgcgccatgacattaaacccgtggtggaacaatttagctttgatcagatcaacgaggcgatcgcccatctagaaagcggcaaagcccattatcgggtagtgctcagccatagtaaaaattagctctgcaaaggttgcttctagatctgtggaacgcccggttgccaccgggcgttttttattcctgcagcgagcgctcgttccgcaaagcggtacggagttagttaggggctaatgggcattctcccgtacaggaaagagttagaagttattaattatcaacaattctcctttgcctagtgcatcgttacctttttaattaaaacataaggaaaactaataatcgtaataatttaacctcaaagtgtaaagaaatgtgaaattctgacttttataacgttaaagagggaaaaattagcagtttaaaatacctagagaatagtctggggtaagcatagagaattagattagttaagttaatcaaattcagaaaaaataataatcgtaaatagttaatctgggtgtatagaaaatgatccccttcatgataagatttaaactcgaaaagcaaaagccaaaaaactaacttccattaaaagaagttgttacatataacgctataaagaaaatttatatatttggaggataccaaccatggtaagatcaagtaacgacgtaacccagcaaggtagtagacctaaaacaaagttgggaggctcaagtatgggtatcattcgcacttgtaggttagggcccgatcaagtgaaatctatgcgagctgctttagatctttttggtagagaatttggtgatgttgcaacttatagtcaacatcaaccagattccgactatttgggaaatcttttacgttctaaaacattcattgcattagcagcatttgatcaggaagctgttgtcggtgcattagccgcttatgttttacccaagtttgaacaacctcgttctgagatctatatctacgatttagcggtatctggcgagcatcgtcgccaagggatagcaacagcgttaatcaatttgttaaagcatgaagctaatgctcttggtgcctatgtgatttacgttcaagcggactatggagatgatcctgccgtagccttgtataccaaacttggaattagagaagaagttatgcactttgatattgatccttctactgctacttaacaattcgttcaagccgagatttaaattacgtacacggcggccgcgaataggaaatctcagttcagagttcggggtgttcactgcactagtcatgaacgggatttttaattcttaattcttaattcttaattatcaattatttaacgtcagttcgggtttgagaatgaaaaaaccctagggataaaggggggtttgcccctagccctttttataaaaaaagaattaaaagctaatcagaaatgaaaaaaataggcagtttaggagagaaaataattgcccagtggttaataaataaaggttattctgttatagaatcaaattggcattgtcgttggggtgaaattgaccttatagtaataaataaaagtttaaaagagattatatttgttgaagttaaaactcgcagtataaaaaattgggatgataatgggctatactctattaataacaaaaaacaagaaaaactctggttaacagctagtttatttttagaaaaaaatcaaatatttactgattggaactgtcgttttgatattgctttattaacttacaaaaaattaactaactttgggacagtattttctgttaacgataattgtttaagaccaaagtttaactatgaaggctatcaatttgaaattgttgattatttggaaaatgctttttaatctgatcttctgcacgtcaaatagtattctacaagacaattcagaatttagaatatattttttggcgttgcttaattatggtatgaaatttactgaaattatgccaaaaattgagacatcaaaatattatcattactgcaagaatgcccatttccccaaccccacctaaatgagaaatcatatacaaaactagtaaagcctatttttttgttacgagattatcccctaactttccattgaggaatcttcaattgtttatcaatgctttttctgctataattgcactcatggtaaggattgaaaacctaaattttaaggtcaattatcttaacttaatcgatagttgtctaagtataactaattgttatagttcatgaagatcaaaatatattgcattttccgcagtattgacagaaacagaagttagtaataaagcaacactatgggtatcagagaaatagttgataattcaagcgatttagaatttagaatcgttagattgatgctaatgccaatagaaatagaattaacttttattaaagaaatagctactattcctttagtctcagctcaaaattagtggactctctactaaattctgtttaggattgccttgttagttaataaattcgctattctcctgattatttttgcgaggagaaaagtcaagtatttacttttttaaaattatgtataaagatataattagtcaccgattaaaactttcattttaagatgatatgagtctaattgtgaacatggaaaagtcgggttttttaaattttacaacttttaggaaactgaaaatataaagtatgaaaaactttatttattcctgaagtcaataggacaaagttcgatgggcaaagggcaaaatgattttgcaagtaccttgacaaaccaaaaattactcgtcttaaaagactgagttttaaacccattgttctttgataaatgataaagaaacgataggataagttaataaaaaatgattttctgggaatcacaagaatttatgaagagatataaaaaaactttcctaagttaagaaaattaagaaaaactaatccatgagactacataaaaacaaggcaaaattttaagattgaactaacattaataattgatttctttaccataattactttgtcttttcataactaattgtgattaaaacagttgaaagtcagactctttttattagctttatatcgttaactaaacattatctgattgtgacaaatttaagcaaaatattttcaaaattatcaacacagaagcgaaaattttgtgaggatatcaatctagaatgacggtgaaaacctctgacacatgcagctcccggagacggtcacagcttgtctgtaagcggatgccgggagcagacaagcccgtcagggcgcgtcagcgggtgttggcgggtgtcggggcgcagccatgacccagtcacgtagcgatagcggagtgtatactggcttaactatgcggcatcagagcagattgtactgagagtgcaccatatgcggtgtgaaataccgcacagatgcgtaaggagaaaataccgcatcaggcgctcttccgcttcctcgctcactgactcgctgcgctcggtcgttcggctgcggcgagcggtatcagctcactcaaaggcggtaatacggttatccacagaatcaggggataacgcaggaaagaacatgtgagcaaaaggccagcaaaaggccaggaaccgtaaaaaggccgcgttgctggcgtttttccataggctccgcccccctgacgagcatcacaaaaatcgacgctcaagtcagaggtggcgaaacccgacaggactataaagataccaggcgtttccccctggaagctccctcgtgcgctctcctgttccgaccctgccgcttaccggatacctgtccgcctttctcccttcgggaagcgtggcgctttctcatagctcacgctgtaggtatctcagttcggtgtaggtcgttcgctccaagctgggctgtgtgcacgaaccccccgttcagcccgaccgctgcgccttatccggtaactatcgtcttgagtccaacccggtaagacacgacttatcgccactggcagcagccactggtaacaggattagcagagcgaggtatgtaggcggtgctacagagttcttgaagtggtggcctaactacggctacactagaaggacagtatttggtatctgcgctctgctgaagccagttaccttcggaaaaagagttggtagctcttgatccggcaaacaaaccaccgctggtagcggtggtttttttgtttgcaagcagcagattacgcgcagaaaaaaaggatctcaagaagatcctttgatcttttctaatgcatattttaccctcgacaaatccaagaccatgcaacatttagggtagaattatttttatactcgtaatgtgattgatgtttataacccatgatttttcccgatttttctgcattttctaaccttgttcatcagggaaattttattcctgtttatcgagaattggtagcggatttagaaacccctgtttctgcttggtataaagtttgtgcagaccagccctatagtttcttgttagagtcagtagaaggtggggaaaatttaggaagatatagctttttaggttgtgatcctgtttggatactagaagcaaggggaaatcagaccaaacaagttcatcgtgatggtaaaatcgaaactttttcaggaaatccctttaacatcctctctcaatgtttagaaactattaaacctgttaaattaccagagttgccccccggtattggcggactatttggttattggggttatgagttaatttcttggattgaaccacgagtcaacgtttatcctgcctctgcggaaagtttacccgatggtatttggatgcaggtagataatttattgatttttgatcaagtaaaaagaaaaatatgggcgatcgcatatgcagatttaagacaggagcatttaagcctagaagaaatctacaatcaggcttgtgacaaaatttctaaattagttttaaaactacaattacctttaccagtatccgcaaaaccccttgaatttaaccccccgccaaaaactcaaaaaaatcatcgcattcaatacaaaagcaacaccagcaaagaggcattttgtgccaatgtggaaaaagctaaagaatacattaaagcaggagatatttttcaagtagtcatttctcagaaattacaatctcattatcaaggtcatccttttgagttgtatcgctccttacgtttgattaacccttccccttatatggcttactataactttcatggatggcagttaatcggctcttctcccgaagtaatggttaaagcagaaaaaactaatgatggtaaaaccaaagccgtagtccgtcccattgcaggaacacgtccaaggggcagaaactatcaagaagaccaatttttagcccaagacttactcaatgatcccaaagaaagggcagaacacgtcatgttagtagatttgggcagaaatgacttaggcagggtctgtgtaaaaggaagcgtggaagtcgatgaattgatggttattgaacgttattcccacgtaatgcacatagtcagtaacgttgtgggagagttagcaggggattactgtgcatgggatttactaaaggcggctttccccgcaggtacggtaagtggagctcctaaaattcgagcaatggaaattattaatgaacttgaacccgaaaggaggggaccttattctggggtttatggttactatgattttgaaggacagttaaatactgctatcacaattagaacgatggttgtggaaaccctttctgggacggaaaatcacttggtatccgttcaagctggagcaggcttagtcgctgactcagatccagacaaggagtatcaagaaactttgaataaagctagaggtttgctagaggcgattagtagcttaagctaagtgaaaattcgtaataaaaaagagcaaatttttgtgactttaaacctgacacctgaaatttatttttgaactccgaacccaaataatgattcaggttgcttaaactcagagaatcattaataattgattcttgttaactcaattgtcatttttaacatgggtgttgaactccgaagctatgtctatctcgatcgattacaacctcaacacgcttcctatataggtacggttgctctaggatttttacctttacccggtgatgcttctttatggattgaaatatcccccggaattgaaataaatcgaattactgatgtggctttgaagtctgctgg

SEQ ID NO: 108 - DNA, 9237 bp, Cyanobacterium sp. ABICyano1
tcgactggtcaagttactatatgtttagaaacaacaaaaaaagaagtcattataaaaataattgatacaggaattggcattaataaagaagaacaaaaattaatttttaatcgtttttatcgaatcaataaagcaagaaatagagagaaaggcagttgcggattaggtttagctattgcaaatgcgatcgcgcttaatcatggtggtagaataattttagaaagtcaagaaaatcaaggcagtatttttaccgtttatttaccgaaaatcatttcatcctaatttcatattcttttgacagaatcaaaggtaaagataaaaagagagaaacagtcatgaattcttataccgtgggtacttatttagccgaacgcttagtgcaaattggtttaaaacatcattttgccgtggctggggactataatttagtgttattggataacttattattaaataaaaacatggaacaagtgtattgttgtaatgaattaaattgtggtttttctgctgaaggttatgctagagctaaaggtgcagctgctgctgttgttacttattctgtgggtgctttatctgcttttgatgctattggtggtgcttatgccgaaaatttacccgtgattttaatttctggtgcccctaataataatgatcatgccgctggacatgttttacatcatgccttaggtaaaaccgattatcattatcaattagaaatggccaaaaatattactgctgctgccgaagctatttatactcctgaagaagcccctgccaaaattgatcatgtgattaaaaccgccttacgcgaaaaaaaacccgtgtatttagaaattgcctgtaatattgcttctatgccttgtgctgctcctgggcctgcttctgctttatttaatgatgaagcctctgatgaagctagtttaaatgctgccgtggaagaaaccttaaaatttattgccaatcgcgataaagttgccgtgttagttggttctaaattaagagctgctggtgctgaagaagctgctgttaaatttgctgatgctttaggtggtgcagttgctactatggctgctgccaaatctttttttcccgaagaaaatccccattatattggaactagttggggagaagtttcttatcctggtgtggaaaaaactatgaaagaagccgacgctgttattgctttagcccctgtgtttaatgattattctaccactggttggactgatattcccgatcccaaaaaattagttttagccgaacctcgttctgttgttgttaatggtgttcgctttccctctgtgcatttaaaagattatttaacccgcttagcccaaaaagtttctaaaaaaactggtgccttagatttttttaaatctttaaatgcgggtgaattaaaaaaagctgctcctgctgatccttctgctcctttagttaatgctgaaattgcccgtcaagttgaagccttattaacccctaatactaccgttattgccgaaactggtgattcttggtttaatgcccaacgcatgaaattacctaatggtgcccgtgttgaatatgaaatgcaatggggtcatattggttggtctgtacctgctgcttttggttatgctgttggtgctcctgaacgtcgtaatattttaatggtgggtgatggttcttttcaattaactgcccaagaagttgcccaaatggttcgcttaaaattacccgttattatttttttaataaataattatggttataccattgaagtgatgattcatgatgggccatataataatattaaaaattgggattatgcgggtttaatggaagtgtttaatggtaatggtggttatgattctggtgctggtaaaggtttaaaagccaaaactggtggtgaattagctgaagctattaaagttgccttagccaatactgatgggccaaccttaattgaatgttttattggtcgcgaagattgtaccgaagaattagttaaatggggtaaacgtgttgctgctgctaattctcgcaaacccgtgaataaattattgtaaggatccagcaaggtttcatcccgaccccctcagggtcgggatttttttattgtgagctctgacataagtaaaggcatcccctgcgtgatataattaccttcagtttaaggaggtatacacatatgattaaagcctacgctgccctggaagccaacggaaaactccaaccctttgaatacgaccccggtgccctgggtgctaatgaggtggagattgaggtgcagtattgtggggtgtgccacagtgatttgtccatgattaataacgaatggggcatttccaattaccccctagtgccgggtcatgaggtggtgggtactgtggccgccatgggcgaaggggtgaaccatgttgaggtgggggatttagtggggctgggttggcattcgggctactgcatgacctgccatagttgtttatctggctaccacaacctttgtgccacggcggaatcgaccattgtgggccactacggtggctttggcgatcgggttcgggccaagggagtcagcgtggtgaaattacctaaaggcattgacctagccagtgccgggccccttttctgtggaggaattaccgttttcagtcctatggtggaactgagtttaaagcccactgcaaaagtggcagtgatcggcattgggggcttgggccatttagcggtgcaatttctccgggcctggggctgtgaagtgactgcctttacctccagtgccaggaagcaaacggaagtgttggaattgggcgctcaccacatactagattccaccaatccagaggcgatcgccagtgcggaaggcaaatttgactatattatctccactgtgaacctgaagcttgactggaacttatacatcagcaccctggcgccccagggacatttccactttgttggggtggtgttggagcctttggatctaaatctttttccccttttgatgggacaacgctccgtttctgcctccccagtgggtagtcccgccaccattgccaccatgttggactttgctgtgcgccatgacattaaacccgtggtggaacaatttagctttgatcagatcaacgaggcgatcgcccatctagaaagcggcaaagcccattatcgggtagtgctcagccatagtaaaaattagctctgcaaaggttgcttctagatctgtggaacgcccggttgccaccgggcgttttttattcctgcagcgagcgctcgttccgcaaagcggtacggagttagttaggggctaatgggcattctcccgtacaggaaagagttagaagttattaattatcaacaattctcctttgcctagtgcatcgttacctttttaattaaaacataaggaaaactaataatcgtaataatttaacctcaaagtgtaaagaaatgtgaaattctgacttttataacgttaaagagggaaaaattagcagtttaaaatacctagagaatagtctggggtaagcatagagaattagattagttaagttaatcaaattcagaaaaaataataatcgtaaatagttaatctgggtgtatagaaaatgatccccttcatgataagatttaaactcgaaaagcaaaagccaaaaaactaacttccattaaaagaagttgttacatataacgctataaagaaaatttatatatttggaggataccaaccatggtaagatcaagtaacgacgtaacccagcaaggtagtagacctaaaacaaagttgggaggctcaagtatgggtatcattcgcacttgtaggttagggcccgatcaagtgaaatctatgcgagctgctttagatctttttggtagagaatttggtgatgttgcaacttatagtcaacatcaaccagattccgactatttgggaaatcttttacgttctaaaacattcattgcattagcagcatttgatcaggaagctgttgtcggtgcattagccgcttatgttttacccaagtttgaacaacctcgttctgagatctatatctacgatttagcggtatctggcgagcatcgtcgccaagggatagcaacagcgttaatcaatttgttaaagcatgaagctaatgctcttggtgcctatgtgatttacgttcaagcggactatggagatgatcctgccgtagccttgtataccaaacttggaattagagaagaagttatgcactttgatattgatccttctactgctacttaacaattcgttcaagccgagatttaaattacgtacacggcggccgcgaataggaaatctcagttcagagttcggggtgttcactgcactagtcatgaacgggatttttaattcttaattcttaattcttaattatcaattatttaacgtcagttcgggtttgagaatgaaaaaaccctagggataaaggggggtttgcccctagccctttttataaaaaaagaattaaaagctaatcagaaatgaaaaaaataggcagtttaggagagaaaataattgcccagtggttaataaataaaggttattctgttatagaatcaaattggcattgtcgttggggtgaaattgaccttatagtaataaataaaagtttaaaagagattatatttgttgaagttaaaactcgcagtataaaaaattgggatgataatgggctatactctattaataacaaaaaacaagaaaaactctggttaacagctagtttatttttagaaaaaaatcaaatatttactgattggaactgtcgttttgatattgctttattaacttacaaaaaattaactaactttgggacagtattttctgttaacgataattgtttaagaccaaagtttaactatgaaggctatcaatttgaaattgttgattatttggaaaatgctttttaatctgatcttctgcacgtcaaatagtattctacaagacaattcagaatttagaatatattttttggcgttgcttaattatggtatgaaatttactgaaattatgccaaaaattgagacatcaaaatattatcattactgcaagaatgcccatttccccaaccccacctaaatgagaaatcatatacaaaactagtaaagcctatttttttgttacgagattatcccctaactttccattgaggaatcttcaattgtttatcaatgctttttctgctataattgcactcatggtaaggattgaaaacctaaattttaaggtcaattatcttaacttaatcgatagttgtctaagtataactaattgttatagttcatgaagatcaaaatatattgcattttccgcagtattgacagaaacagaagttagtaataaagcaacactatgggtatcagagaaatagttgataattcaagcgatttagaatttagaatcgttagattgatgctaatgccaatagaaatagaattaacttttattaaagaaatagctactattcctttagtctcagctcaaaattagtggactctctactaaattctgtttaggattgccttgttagttaataaattcgctattctcctgattatttttgcgaggagaaaagtcaagtatttacttttttaaaattatgtataaagatataattagtcaccgattaaaactttcattttaagatgatatgagtctaattgtgaacatggaaaagtcgggttttttaaattttacaacttttaggaaactgaaaatataaagtatgaaaaactttatttattcctgaagtcaataggacaaagttcgatgggcaaagggcaaaatgattttgcaagtaccttgacaaaccaaaaattactcgtcttaaaagactgagttttaaacccattgttctttgataaatgataaagaaacgataggataagttaataaaaaatgattttctgggaatcacaagaatttatgaagagatataaaaaaactttcctaagttaagaaaattaagaaaaactaatccatgagactacataaaaacaaggcaaaattttaagattgaactaacattaataattgatttctttaccataattactttgtcttttcataactaattgtgattaaaacagttgaaagtcagactctttttattagctttatatcgttaactaaacattatctgattgtgacaaatttaagcaaaatattttcaaaattatcaacacagaagcgaaaattttgtgaggatatcaatctagaatgacggtgaaaacctctgacacatgcagctcccggagacggtcacagcttgtctgtaagcggatgccgggagcagacaagcccgtcagggcgcgtcagcgggtgttggcgggtgtcggggcgcagccatgacccagtcacgtagcgatagcggagtgtatactggcttaactatgcggcatcagagcagattgtactgagagtgcaccatatgcggtgtgaaataccgcacagatgcgtaaggagaaaataccgcatcaggcgctcttccgcttcctcgctcactgactcgctgcgctcggtcgttcggctgcggcgagcggtatcagctcactcaaaggcggtaatacggttatccacagaatcaggggataacgcaggaaagaacatgtgagcaaaaggccagcaaaaggccaggaaccgtaaaaaggccgcgttgctggcgtttttccataggctccgcccccctgacgagcatcacaaaaatcgacgctcaagtcagaggtggcgaaacccgacaggactataaagataccaggcgtttccccctggaagctccctcgtgcgctctcctgttccgaccctgccgcttaccggatacctgtccgcctttctcccttcgggaagcgtggcgctttctcatagctcacgctgtaggtatctcagttcggtgtaggtcgttcgctccaagctgggctgtgtgcacgaaccccccgttcagcccgaccgctgcgccttatccggtaactatcgtcttgagtccaacccggtaagacacgacttatcgccactggcagcagccactggtaacaggattagcagagcgaggtatgtaggcggtgctacagagttcttgaagtggtggcctaactacggctacactagaaggacagtatttggtatctgcgctctgctgaagccagttaccttcggaaaaagagttggtagctcttgatccggcaaacaaaccaccgctggtagcggtggtttttttgtttgcaagcagcagattacgcgcagaaaaaaaggatctcaagaagatcctttgatcttttctaatgcatattttaccctcgacaaatccaagaccatgcaacatttagggtagaattatttttatactcgtaatgtgattgatgtttataacccatgatttttcccgatttttctgcattttctaaccttgttcatcagggaaattttattcctgtttatcgagaattggtagcggatttagaaacccctgtttctgcttggtataaagtttgtgcagaccagccctatagtttcttgttagagtcagtagaaggtggggaaaatttaggaagatatagctttttaggttgtgatcctgtttggatactagaagcaaggggaaatcagaccaaacaagttcatcgtgatggtaaaatcgaaactttttcaggaaatccctttaacatcctctctcaatgtttagaaactattaaacctgttaaattaccagagttgccccccggtattggcggactatttggttattggggttatgagttaatttcttggattgaaccacgagtcaacgtttatcctgcctctgcggaaagtttacccgatggtatttggatgcaggtagataatttattgatttttgatcaagtaaaaagaaaaatatgggcgatcgcatatgcagatttaagacaggagcatttaagcctagaagaaatctacaatcaggcttgtgacaaaatttctaaattagttttaaaactacaattacctttaccagtatccgcaaaaccccttgaatttaaccccccgccaaaaactcaaaaaaatcatcgcattcaatacaaaagcaacaccagcaaagaggcattttgtgccaatgtggaaaaagctaaagaatacattaaagcaggagatatttttcaagtagtcatttctcagaaattacaatctcattatcaaggtcatccttttgagttgtatcgctccttacgtttgattaacccttccccttatatggcttactataactttcatggatggcagttaatcggctcttctcccgaagtaatggttaaagcagaaaaaactaatgatggtaaaaccaaagccgtagtccgtcccattgcaggaacacgtccaaggggcagaaactatcaagaagaccaatttttagcccaagacttactcaatgatcccaaagaaagggcagaacacgtcatgttagtagatttgggcagaaatgacttaggcagggtctgtgtaaaaggaagcgtggaagtcgatgaattgatggttattgaacgttattcccacgtaatgcacatagtcagtaacgttgtgggagagttagcaggggattactgtgcatgggatttactaaaggcggctttccccgcaggtacggtaagtggagctcctaaaattcgagcaatggaaattattaatgaacttgaacccgaaaggaggggaccttattctggggtttatggttactatgattttgaaggacagttaaatactgctatcacaattagaacgatggttgtggaaaccctttctgggacggaaaatcacttggtatccgttcaagctggagcaggcttagtcgctgactcagatccagacaaggagtatcaagaaactttgaataaagctagaggtttgctagaggcgattagtagcttaagctaagtgaaaattcgtaataaaaaagagcaaatttttgtgactttaaacctgacacctgaaatttatttttgaactccgaacccaaataatgattcaggttgcttaaactcagagaatcattaataattgattcttgttaactcaattgtcatttttaacatgggtgttgaactccgaagctatgtctatctcgatcgattacaacctcaacacgcttcctatataggtacggttgctctaggatttttacctttacccggtgatgcttctttatggattgaaatatcccccggaattgaaataaatcgaattactgatgtggctttgaagtctgctgg

SEQ ID NO: 109 - DNA, 9050 bp, Cyanobacterium sp. ABICyano1
tcgacaattaataacttcttcctgtacgggcgaatggccatttgctcctaactaactccgtactgctttgcggaacgagcgtagcgaactctccgaattactaagccttcatccctgatagatgcaaaaaacgaattaaaattatgtgtaaaaagaaaatgtgtctttatttagtagtcaaagttacaaaatattaagaatcaaattaataatgtattgggcagttaagtatataagtctttaaatatttatttgtattcaatatattaaccgaggacaaattatgaattcttataccgtgggtacttatttagccgaacgcttagtgcaaattggtttaaaacatcattttgccgtggctggggactataatttagtgttattggataacttattattaaataaaaacatggaacaagtgtattgttgtaatgaattaaattgtggtttttctgctgaaggttatgctagagctaaaggtgcagctgctgctgttgttacttattctgtgggtgctttatctgcttttgatgctattggtggtgcttatgccgaaaatttacccgtgattttaatttctggtgcccctaataataatgatcatgccgctggacatgttttacatcatgccttaggtaaaaccgattatcattatcaattagaaatggccaaaaatattactgctgctgccgaagctatttatactcctgaagaagcccctgccaaaattgatcatgtgattaaaaccgccttacgcgaaaaaaaacccgtgtatttagaaattgcctgtaatattgcttctatgccttgtgctgctcctgggcctgcttctgctttatttaatgatgaagcctctgatgaagctagtttaaatgctgccgtggaagaaaccttaaaatttattgccaatcgcgataaagttgccgtgttagttggttctaaattaagagctgctggtgctgaagaagctgctgttaaatttgctgatgctttaggtggtgcagttgctactatggctgctgccaaatctttttttcccgaagaaaatccccattatattggaactagttggggagaagtttcttatcctggtgtggaaaaaactatgaaagaagccgacgctgttattgctttagcccctgtgtttaatgattattctaccactggttggactgatattcccgatcccaaaaaattagttttagccgaacctcgttctgttgttgttaatggtgttcgctttccctctgtgcatttaaaagattatttaacccgcttagcccaaaaagtttctaaaaaaactggtgccttagatttttttaaatctttaaatgcgggtgaattaaaaaaagctgctcctgctgatccttctgctcctttagttaatgctgaaattgcccgtcaagttgaagccttattaacccctaatactaccgttattgccgaaactggtgattcttggtttaatgcccaacgcatgaaattacctaatggtgcccgtgttgaatatgaaatgcaatggggtcatattggttggtctgtacctgctgcttttggttatgctgttggtgctcctgaacgtcgtaatattttaatggtgggtgatggttcttttcaattaactgcccaagaagttgcccaaatggttcgcttaaaattacccgttattatttttttaataaataattatggttataccattgaagtgatgattcatgatgggccatataataatattaaaaattgggattatgcgggtttaatggaagtgtttaatggtaatggtggttatgattctggtgctggtaaaggtttaaaagccaaaactggtggtgaattagctgaagctattaaagttgccttagccaatactgatgggccaaccttaattgaatgttttattggtcgcgaagattgtaccgaagaattagttaaatggggtaaacgtgttgctgctgctaattctcgcaaacccgtgaataaattattgtaaggatccagcaaggtttcatcccgaccccctcagggtcgggatttttttattgtgagctctgacataagtaaaggcatcccctgcgtgatataattaccttcagtttaaggaggtatacacatatgattaaagcctacgctgccctggaagccaacggaaaactccaaccctttgaatacgaccccggtgccctgggtgctaatgaggtggagattgaggtgcagtattgtggggtgtgccacagtgatttgtccatgattaataacgaatggggcatttccaattaccccctagtgccgggtcatgaggtggtgggtactgtggccgccatgggcgaaggggtgaaccatgttgaggtgggggatttagtggggctgggttggcattcgggctactgcatgacctgccatagttgtttatctggctaccacaacctttgtgccacggcggaatcgaccattgtgggccactacggtggctttggcgatcgggttcgggccaagggagtcagcgtggtgaaattacctaaaggcattgacctagccagtgccgggccccttttctgtggaggaattaccgttttcagtcctatggtggaactgagtttaaagcccactgcaaaagtggcagtgatcggcattgggggcttgggccatttagcggtgcaatttctccgggcctggggctgtgaagtgactgcctttacctccagtgccaggaagcaaacggaagtgttggaattgggcgctcaccacatactagattccaccaatccagaggcgatcgccagtgcggaaggcaaatttgactatattatctccactgtgaacctgaagcttgactggaacttatacatcagcaccctggcgccccagggacatttccactttgttggggtggtgttggagcctttggatctaaatctttttccccttttgatgggacaacgctccgtttctgcctccccagtgggtagtcccgccaccattgccaccatgttggactttgctgtgcgccatgacattaaacccgtggtggaacaatttagctttgatcagatcaacgaggcgatcgcccatctagaaagcggcaaagcccattatcgggtagtgctcagccatagtaaaaattagctctgcaaaggttgcttctagatctgtggaacgcccggttgccaccgggcgttttttattcctgcagtgagaaaaagtgtaaacaaatattaagaaaaagatcagaaaaatttaacaacacgtaataaaaaaatgcgtcactacgggttataaatttacatgaaaggttaaaacacttttctgagacgattttgataaaaaagttgtcaaaaaattaagtttctttacaaatgcttaacaaaaacttggttttaagcacaaaataagagagactaatttgcagaagttttacaaggaaatcttgaagaaaaagatctaagtaaaacgactctgtttaaccaaaatttaacaaatttaacaaaacaaactaaatctattaggagattaactaaaaccatggtaagatcaagtaacgacgtaacccagcaaggtagtagacctaaaacaaagttgggaggctcaagtatgggtatcattcgcacttgtaggttagggcccgatcaagtgaaatctatgcgagctgctttagatctttttggtagagaatttggtgatgttgcaacttatagtcaacatcaaccagattccgactatttgggaaatcttttacgttctaaaacattcattgcattagcagcatttgatcaggaagctgttgtcggtgcattagccgcttatgttttacccaagtttgaacaacctcgttctgagatctatatctacgatttagcggtatctggcgagcatcgtcgccaagggatagcaacagcgttaatcaatttgttaaagcatgaagctaatgctcttggtgcctatgtgatttacgttcaagcggactatggagatgatcctgccgtagccttgtataccaaacttggaattagagaagaagttatgcactttgatattgatccttctactgctacttaacaattcgttcaagccgagatttaaattacgtacacggcggccgcgaataggaaatctcagttcagagttcggggtgttcactgcactagtcatgaacgggatttttaattcttaattcttaattcttaattatcaattatttaacgtcagttcgggtttgagaatgaaaaaaccctagggataaaggggggtttgcccctagccctttttataaaaaaagaattaaaagctaatcagaaatgaaaaaaataggcagtttaggagagaaaataattgcccagtggttaataaataaaggttattctgttatagaatcaaattggcattgtcgttggggtgaaattgaccttatagtaataaataaaagtttaaaagagattatatttgttgaagttaaaactcgcagtataaaaaattgggatgataatgggctatactctattaataacaaaaaacaagaaaaactctggttaacagctagtttatttttagaaaaaaatcaaatatttactgattggaactgtcgttttgatattgctttattaacttacaaaaaattaactaactttgggacagtattttctgttaacgataattgtttaagaccaaagtttaactatgaaggctatcaatttgaaattgttgattatttggaaaatgctttttaatctgatcttctgcacgtcaaatagtattctacaagacaattcagaatttagaatatattttttggcgttgcttaattatggtatgaaatttactgaaattatgccaaaaattgagacatcaaaatattatcattactgcaagaatgcccatttccccaaccccacctaaatgagaaatcatatacaaaactagtaaagcctatttttttgttacgagattatcccctaactttccattgaggaatcttcaattgtttatcaatgctttttctgctataattgcactcatggtaaggattgaaaacctaaattttaaggtcaattatcttaacttaatcgatagttgtctaagtataactaattgttatagttcatgaagatcaaaatatattgcattttccgcagtattgacagaaacagaagttagtaataaagcaacactatgggtatcagagaaatagttgataattcaagcgatttagaatttagaatcgttagattgatgctaatgccaatagaaatagaattaacttttattaaagaaatagctactattcctttagtctcagctcaaaattagtggactctctactaaattctgtttaggattgccttgttagttaataaattcgctattctcctgattatttttgcgaggagaaaagtcaagtatttacttttttaaaattatgtataaagatataattagtcaccgattaaaactttcattttaagatgatatgagtctaattgtgaacatggaaaagtcgggttttttaaattttacaacttttaggaaactgaaaatataaagtatgaaaaactttatttattcctgaagtcaataggacaaagttcgatgggcaaagggcaaaatgattttgcaagtaccttgacaaaccaaaaattactcgtcttaaaagactgagttttaaacccattgttctttgataaatgataaagaaacgataggataagttaataaaaaatgattttctgggaatcacaagaatttatgaagagatataaaaaaactttcctaagttaagaaaattaagaaaaactaatccatgagactacataaaaacaaggcaaaattttaagattgaactaacattaataattgatttctttaccataattactttgtcttttcataactaattgtgattaaaacagttgaaagtcagactctttttattagctttatatcgttaactaaacattatctgattgtgacaaatttaagcaaaatattttcaaaattatcaacacagaagcgaaaattttgtgaggatatcaatctagaatgacggtgaaaacctctgacacatgcagctcccggagacggtcacagcttgtctgtaagcggatgccgggagcagacaagcccgtcagggcgcgtcagcgggtgttggcgggtgtcggggcgcagccatgacccagtcacgtagcgatagcggagtgtatactggcttaactatgcggcatcagagcagattgtactgagagtgcaccatatgcggtgtgaaataccgcacagatgcgtaaggagaaaataccgcatcaggcgctcttccgcttcctcgctcactgactcgctgcgctcggtcgttcggctgcggcgagcggtatcagctcactcaaaggcggtaatacggttatccacagaatcaggggataacgcaggaaagaacatgtgagcaaaaggccagcaaaaggccaggaaccgtaaaaaggccgcgttgctggcgtttttccataggctccgcccccctgacgagcatcacaaaaatcgacgctcaagtcagaggtggcgaaacccgacaggactataaagataccaggcgtttccccctggaagctccctcgtgcgctctcctgttccgaccctgccgcttaccggatacctgtccgcctttctcccttcgggaagcgtggcgctttctcatagctcacgctgtaggtatctcagttcggtgtaggtcgttcgctccaagctgggctgtgtgcacgaaccccccgttcagcccgaccgctgcgccttatccggtaactatcgtcttgagtccaacccggtaagacacgacttatcgccactggcagcagccactggtaacaggattagcagagcgaggtatgtaggcggtgctacagagttcttgaagtggtggcctaactacggctacactagaaggacagtatttggtatctgcgctctgctgaagccagttaccttcggaaaaagagttggtagctcttgatccggcaaacaaaccaccgctggtagcggtggtttttttgtttgcaagcagcagattacgcgcagaaaaaaaggatctcaagaagatcctttgatcttttctaatgcatattttaccctcgacaaatccaagaccatgcaacatttagggtagaattatttttatactcgtaatgtgattgatgtttataacccatgatttttcccgatttttctgcattttctaaccttgttcatcagggaaattttattcctgtttatcgagaattggtagcggatttagaaacccctgtttctgcttggtataaagtttgtgcagaccagccctatagtttcttgttagagtcagtagaaggtggggaaaatttaggaagatatagctttttaggttgtgatcctgtttggatactagaagcaaggggaaatcagaccaaacaagttcatcgtgatggtaaaatcgaaactttttcaggaaatccctttaacatcctctctcaatgtttagaaactattaaacctgttaaattaccagagttgccccccggtattggcggactatttggttattggggttatgagttaatttcttggattgaaccacgagtcaacgtttatcctgcctctgcggaaagtttacccgatggtatttggatgcaggtagataatttattgatttttgatcaagtaaaaagaaaaatatgggcgatcgcatatgcagatttaagacaggagcatttaagcctagaagaaatctacaatcaggcttgtgacaaaatttctaaattagttttaaaactacaattacctttaccagtatccgcaaaaccccttgaatttaaccccccgccaaaaactcaaaaaaatcatcgcattcaatacaaaagcaacaccagcaaagaggcattttgtgccaatgtggaaaaagctaaagaatacattaaagcaggagatatttttcaagtagtcatttctcagaaattacaatctcattatcaaggtcatccttttgagttgtatcgctccttacgtttgattaacccttccccttatatggcttactataactttcatggatggcagttaatcggctcttctcccgaagtaatggttaaagcagaaaaaactaatgatggtaaaaccaaagccgtagtccgtcccattgcaggaacacgtccaaggggcagaaactatcaagaagaccaatttttagcccaagacttactcaatgatcccaaagaaagggcagaacacgtcatgttagtagatttgggcagaaatgacttaggcagggtctgtgtaaaaggaagcgtggaagtcgatgaattgatggttattgaacgttattcccacgtaatgcacatagtcagtaacgttgtgggagagttagcaggggattactgtgcatgggatttactaaaggcggctttccccgcaggtacggtaagtggagctcctaaaattcgagcaatggaaattattaatgaacttgaacccgaaaggaggggaccttattctggggtttatggttactatgattttgaaggacagttaaatactgctatcacaattagaacgatggttgtggaaaccctttctgggacggaaaatcacttggtatccgttcaagctggagcaggcttagtcgctgactcagatccagacaaggagtatcaagaaactttgaataaagctagaggtttgctagaggcgattagtagcttaagctaagtgaaaattcgtaataaaaaagagcaaatttttgtgactttaaacctgacacctgaaatttatttttgaactccgaacccaaataatgattcaggttgcttaaactcagagaatcattaataattgattcttgttaactcaattgtcatttttaacatgggtgttgaactccgaagctatgtctatctcgatcgattacaacctcaacacgcttcctatataggtacggttgctctaggatttttacctttacccggtgatgcttctttatggattgaaatatcccccggaattgaaataaatcgaattactgatgtggctttgaagtctgctgg

SEQ ID NO: 110 - DNA, 9102 bp, Cyanobacterium sp. ABICyano1
tcgactggtcaagttactatatgtttagaaacaacaaaaaaagaagtcattataaaaataattgatacaggaattggcattaataaagaagaacaaaaattaatttttaatcgtttttatcgaatcaataaagcaagaaatagagagaaaggcagttgcggattaggtttagctattgcaaatgcgatcgcgcttaatcatggtggtagaataattttagaaagtcaagaaaatcaaggcagtatttttaccgtttatttaccgaaaatcatttcatcctaatttcatattcttttgacagaatcaaaggtaaagataaaaagagagaaacagtcatgaattcttataccgtgggtacttatttagccgaacgcttagtgcaaattggtttaaaacatcattttgccgtggctggggactataatttagtgttattggataacttattattaaataaaaacatggaacaagtgtattgttgtaatgaattaaattgtggtttttctgctgaaggttatgctagagctaaaggtgcagctgctgctgttgttacttattctgtgggtgctttatctgcttttgatgctattggtggtgcttatgccgaaaatttacccgtgattttaatttctggtgcccctaataataatgatcatgccgctggacatgttttacatcatgccttaggtaaaaccgattatcattatcaattagaaatggccaaaaatattactgctgctgccgaagctatttatactcctgaagaagcccctgccaaaattgatcatgtgattaaaaccgccttacgcgaaaaaaaacccgtgtatttagaaattgcctgtaatattgcttctatgccttgtgctgctcctgggcctgcttctgctttatttaatgatgaagcctctgatgaagctagtttaaatgctgccgtggaagaaaccttaaaatttattgccaatcgcgataaagttgccgtgttagttggttctaaattaagagctgctggtgctgaagaagctgctgttaaatttgctgatgctttaggtggtgcagttgctactatggctgctgccaaatctttttttcccgaagaaaatccccattatattggaactagttggggagaagtttcttatcctggtgtggaaaaaactatgaaagaagccgacgctgttattgctttagcccctgtgtttaatgattattctaccactggttggactgatattcccgatcccaaaaaattagttttagccgaacctcgttctgttgttgttaatggtgttcgctttccctctgtgcatttaaaagattatttaacccgcttagcccaaaaagtttctaaaaaaactggtgccttagatttttttaaatctttaaatgcgggtgaattaaaaaaagctgctcctgctgatccttctgctcctttagttaatgctgaaattgcccgtcaagttgaagccttattaacccctaatactaccgttattgccgaaactggtgattcttggtttaatgcccaacgcatgaaattacctaatggtgcccgtgttgaatatgaaatgcaatggggtcatattggttggtctgtacctgctgcttttggttatgctgttggtgctcctgaacgtcgtaatattttaatggtgggtgatggttcttttcaattaactgcccaagaagttgcccaaatggttcgcttaaaattacccgttattatttttttaataaataattatggttataccattgaagtgatgattcatgatgggccatataataatattaaaaattgggattatgcgggtttaatggaagtgtttaatggtaatggtggttatgattctggtgctggtaaaggtttaaaagccaaaactggtggtgaattagctgaagctattaaagttgccttagccaatactgatgggccaaccttaattgaatgttttattggtcgcgaagattgtaccgaagaattagttaaatggggtaaacgtgttgctgctgctaattctcgcaaacccgtgaataaattattgtaaggatccagcaaggtttcatcccgaccccctcagggtcgggatttttttattgtgagctctgacataagtaaaggcatcccctgcgtgatataattaccttcagtttaaggaggtatacacatatgattaaagcctacgctgccctggaagccaacggaaaactccaaccctttgaatacgaccccggtgccctgggtgctaatgaggtggagattgaggtgcagtattgtggggtgtgccacagtgatttgtccatgattaataacgaatggggcatttccaattaccccctagtgccgggtcatgaggtggtgggtactgtggccgccatgggcgaaggggtgaaccatgttgaggtgggggatttagtggggctgggttggcattcgggctactgcatgacctgccatagttgtttatctggctaccacaacctttgtgccacggcggaatcgaccattgtgggccactacggtggctttggcgatcgggttcgggccaagggagtcagcgtggtgaaattacctaaaggcattgacctagccagtgccgggccccttttctgtggaggaattaccgttttcagtcctatggtggaactgagtttaaagcccactgcaaaagtggcagtgatcggcattgggggcttgggccatttagcggtgcaatttctccgggcctggggctgtgaagtgactgcctttacctccagtgccaggaagcaaacggaagtgttggaattgggcgctcaccacatactagattccaccaatccagaggcgatcgccagtgcggaaggcaaatttgactatattatctccactgtgaacctgaagcttgactggaacttatacatcagcaccctggcgccccagggacatttccactttgttggggtggtgttggagcctttggatctaaatctttttccccttttgatgggacaacgctccgtttctgcctccccagtgggtagtcccgccaccattgccaccatgttggactttgctgtgcgccatgacattaaacccgtggtggaacaatttagctttgatcagatcaacgaggcgatcgcccatctagaaagcggcaaagcccattatcgggtagtgctcagccatagtaaaaattagctctgcaaaggttgcttctagatctgtggaacgcccggttgccaccgggcgttttttattcctgcagtgagaaaaagtgtaaacaaatattaagaaaaagatcagaaaaatttaacaacacgtaataaaaaaatgcgtcactacgggttataaatttacatgaaaggttaaaacacttttctgagacgattttgataaaaaagttgtcaaaaaattaagtttctttacaaatgcttaacaaaaacttggttttaagcacaaaataagagagactaatttgcagaagttttacaaggaaatcttgaagaaaaagatctaagtaaaacgactctgtttaaccaaaatttaacaaatttaacaaaacaaactaaatctattaggagattaactaaaaccatggtaagatcaagtaacgacgtaacccagcaaggtagtagacctaaaacaaagttgggaggctcaagtatgggtatcattcgcacttgtaggttagggcccgatcaagtgaaatctatgcgagctgctttagatctttttggtagagaatttggtgatgttgcaacttatagtcaacatcaaccagattccgactatttgggaaatcttttacgttctaaaacattcattgcattagcagcatttgatcaggaagctgttgtcggtgcattagccgcttatgttttacccaagtttgaacaacctcgttctgagatctatatctacgatttagcggtatctggcgagcatcgtcgccaagggatagcaacagcgttaatcaatttgttaaagcatgaagctaatgctcttggtgcctatgtgatttacgttcaagcggactatggagatgatcctgccgtagccttgtataccaaacttggaattagagaagaagttatgcactttgatattgatccttctactgctacttaacaattcgttcaagccgagatttaaattacgtacacggcggccgcgaataggaaatctcagttcagagttcggggtgttcactgcactagtcatgaacgggatttttaattcttaattcttaattcttaattatcaattatttaacgtcagttcgggtttgagaatgaaaaaaccctagggataaaggggggtttgcccctagccctttttataaaaaaagaattaaaagctaatcagaaatgaaaaaaataggcagtttaggagagaaaataattgcccagtggttaataaataaaggttattctgttatagaatcaaattggcattgtcgttggggtgaaattgaccttatagtaataaataaaagtttaaaagagattatatttgttgaagttaaaactcgcagtataaaaaattgggatgataatgggctatactctattaataacaaaaaacaagaaaaactctggttaacagctagtttatttttagaaaaaaatcaaatatttactgattggaactgtcgttttgatattgctttattaacttacaaaaaattaactaactttgggacagtattttctgttaacgataattgtttaagaccaaagtttaactatgaaggctatcaatttgaaattgttgattatttggaaaatgctttttaatctgatcttctgcacgtcaaatagtattctacaagacaattcagaatttagaatatattttttggcgttgcttaattatggtatgaaatttactgaaattatgccaaaaattgagacatcaaaatattatcattactgcaagaatgcccatttccccaaccccacctaaatgagaaatcatatacaaaactagtaaagcctatttttttgttacgagattatcccctaactttccattgaggaatcttcaattgtttatcaatgctttttctgctataattgcactcatggtaaggattgaaaacctaaattttaaggtcaattatcttaacttaatcgatagttgtctaagtataactaattgttatagttcatgaagatcaaaatatattgcattttccgcagtattgacagaaacagaagttagtaataaagcaacactatgggtatcagagaaatagttgataattcaagcgatttagaatttagaatcgttagattgatgctaatgccaatagaaatagaattaacttttattaaagaaatagctactattcctttagtctcagctcaaaattagtggactctctactaaattctgtttaggattgccttgttagttaataaattcgctattctcctgattatttttgcgaggagaaaagtcaagtatttacttttttaaaattatgtataaagatataattagtcaccgattaaaactttcattttaagatgatatgagtctaattgtgaacatggaaaagtcgggttttttaaattttacaacttttaggaaactgaaaatataaagtatgaaaaactttatttattcctgaagtcaataggacaaagttcgatgggcaaagggcaaaatgattttgcaagtaccttgacaaaccaaaaattactcgtcttaaaagactgagttttaaacccattgttctttgataaatgataaagaaacgataggataagttaataaaaaatgattttctgggaatcacaagaatttatgaagagatataaaaaaactttcctaagttaagaaaattaagaaaaactaatccatgagactacataaaaacaaggcaaaattttaagattgaactaacattaataattgatttctttaccataattactttgtcttttcataactaattgtgattaaaacagttgaaagtcagactctttttattagctttatatcgttaactaaacattatctgattgtgacaaatttaagcaaaatattttcaaaattatcaacacagaagcgaaaattttgtgaggatatcaatctagaatgacggtgaaaacctctgacacatgcagctcccggagacggtcacagcttgtctgtaagcggatgccgggagcagacaagcccgtcagggcgcgtcagcgggtgttggcgggtgtcggggcgcagccatgacccagtcacgtagcgatagcggagtgtatactggcttaactatgcggcatcagagcagattgtactgagagtgcaccatatgcggtgtgaaataccgcacagatgcgtaaggagaaaataccgcatcaggcgctcttccgcttcctcgctcactgactcgctgcgctcggtcgttcggctgcggcgagcggtatcagctcactcaaaggcggtaatacggttatccacagaatcaggggataacgcaggaaagaacatgtgagcaaaaggccagcaaaaggccaggaaccgtaaaaaggccgcgttgctggcgtttttccataggctccgcccccctgacgagcatcacaaaaatcgacgctcaagtcagaggtggcgaaacccgacaggactataaagataccaggcgtttccccctggaagctccctcgtgcgctctcctgttccgaccctgccgcttaccggatacctgtccgcctttctcccttcgggaagcgtggcgctttctcatagctcacgctgtaggtatctcagttcggtgtaggtcgttcgctccaagctgggctgtgtgcacgaaccccccgttcagcccgaccgctgcgccttatccggtaactatcgtcttgagtccaacccggtaagacacgacttatcgccactggcagcagccactggtaacaggattagcagagcgaggtatgtaggcggtgctacagagttcttgaagtggtggcctaactacggctacactagaaggacagtatttggtatctgcgctctgctgaagccagttaccttcggaaaaagagttggtagctcttgatccggcaaacaaaccaccgctggtagcggtggtttttttgtttgcaagcagcagattacgcgcagaaaaaaaggatctcaagaagatcctttgatcttttctaatgcatattttaccctcgacaaatccaagaccatgcaacatttagggtagaattatttttatactcgtaatgtgattgatgtttataacccatgatttttcccgatttttctgcattttctaaccttgttcatcagggaaattttattcctgtttatcgagaattggtagcggatttagaaacccctgtttctgcttggtataaagtttgtgcagaccagccctatagtttcttgttagagtcagtagaaggtggggaaaatttaggaagatatagctttttaggttgtgatcctgtttggatactagaagcaaggggaaatcagaccaaacaagttcatcgtgatggtaaaatcgaaactttttcaggaaatccctttaacatcctctctcaatgtttagaaactattaaacctgttaaattaccagagttgccccccggtattggcggactatttggttattggggttatgagttaatttcttggattgaaccacgagtcaacgtttatcctgcctctgcggaaagtttacccgatggtatttggatgcaggtagataatttattgatttttgatcaagtaaaaagaaaaatatgggcgatcgcatatgcagatttaagacaggagcatttaagcctagaagaaatctacaatcaggcttgtgacaaaatttctaaattagttttaaaactacaattacctttaccagtatccgcaaaaccccttgaatttaaccccccgccaaaaactcaaaaaaatcatcgcattcaatacaaaagcaacaccagcaaagaggcattttgtgccaatgtggaaaaagctaaagaatacattaaagcaggagatatttttcaagtagtcatttctcagaaattacaatctcattatcaaggtcatccttttgagttgtatcgctccttacgtttgattaacccttccccttatatggcttactataactttcatggatggcagttaatcggctcttctcccgaagtaatggttaaagcagaaaaaactaatgatggtaaaaccaaagccgtagtccgtcccattgcaggaacacgtccaaggggcagaaactatcaagaagaccaatttttagcccaagacttactcaatgatcccaaagaaagggcagaacacgtcatgttagtagatttgggcagaaatgacttaggcagggtctgtgtaaaaggaagcgtggaagtcgatgaattgatggttattgaacgttattcccacgtaatgcacatagtcagtaacgttgtgggagagttagcaggggattactgtgcatgggatttactaaaggcggctttccccgcaggtacggtaagtggagctcctaaaattcgagcaatggaaattattaatgaacttgaacccgaaaggaggggaccttattctggggtttatggttactatgattttgaaggacagttaaatactgctatcacaattagaacgatggttgtggaaaccctttctgggacggaaaatcacttggtatccgttcaagctggagcaggcttagtcgctgactcagatccagacaaggagtatcaagaaactttgaataaagctagaggtttgctagaggcgattagtagcttaagctaagtgaaaattcgtaataaaaaagagcaaatttttgtgactttaaacctgacacctgaaatttatttttgaactccgaacccaaataatgattcaggttgcttaaactcagagaatcattaataattgattcttgttaactcaattgtcatttttaacatgggtgttgaactccgaagctatgtctatctcgatcgattacaacctcaacacgcttcctatataggtacggttgctctaggatttttacctttacccggtgatgcttctttatggattgaaatatcccccggaattgaaataaatcgaattactgatgtggctttgaagtctgctgg

SEQ ID NO: 111 - DNA, 14652 bp, Cyanobacterium sp. ABICyano1
tcgacaattaataacttcttcctgtacgggcgaatggccatttgctcctaactaactccgtactgctttgcggaacgagcgtagcgaactctccgaattactaagccttcatccctgatagatgcaaaaaacgaattaaaattatgtgtaaaaagaaaatgtgtctttatttagtagtcaaagttacaaaatattaagaatcaaattaataatgtattgggcagttaagtatataagtctttaaatatttatttgtattcaatatattaaccgaggacaaattatgaattcttacactgttggaacctatttagcagaacgtttagttcaaattggtctcaaacaccattttgcagtagctggtgattataatttagttttattggataacttattgttaaataagaatatggaacaagtgtattgttgtaatgaattaaactgtggtttttctgctgagggatatgctcgtgcaaaaggtgctgccgcagcagttgttacttattctgttggagcattaagtgcttttgacgctattggaggtgcttatgcagaaaatttacctgtaatcttaatctctggtgcacccaataacaacgatcacgctgctggtcatgtattgcatcatgctttaggtaaaaccgattatcattaccaattagaaatggcaaaaaatattaccgctgccgcagaagctatttatactcccgaagaagcacctgctaagatcgatcacgtaattaaaaccgctctccgtgagaaaaaacccgtatatttagaaatcgcttgcaatatcgcttctatgccttgtgcagctcctggacctgctagtgctttatttaacgatgaagcatctgatgaggctagtttaaatgccgctgttgaagaaactttgaaatttattgctaatcgtgataaagtagctgttttagttggttctaaactccgtgccgctggtgcagaagaagcggctgtaaaattcgcagatgccttaggaggtgctgttgccacaatggcagccgctaaaagttttttccccgaagaaaatcctcattacattggtacttcttggggtgaggtatcttaccctggtgtagaaaaaaccatgaaggaagctgatgcagtaattgcattagctcctgttttcaatgattactctaccactggttggactgatattccagaccccaaaaaattagttttagcagaacctcgctctgtagttgtgaatggtgttagatttcccagtgtacatctcaaagattatttaactcgtttagctcaaaaagtgagtaaaaagactggcgcactcgatttctttaaatctttaaatgctggtgaattaaagaaagcagctcctgctgatcccagtgctcctttagtgaatgccgaaatcgcaagacaagttgaagccttgttaactcctaacactaccgttattgccgagactggtgatagttggttcaatgctcaacgcatgaaattacccaatggtgctcgtgttgagtatgaaatgcaatggggtcacattggatggtctgttcctgctgcatttggatatgcagttggagcacctgagcgtagaaacattttaatggtaggtgatggttctttccaactcactgctcaagaagttgcacaaatggtacgtttaaaattgcctgttattatctttctcattaacaactatggttacaccattgaagttatgattcatgatggtccttataataacattaagaattgggattacgcaggtttaatggaggtatttaacggtaatggtggatacgacagtggagcaggtaaaggattaaaagctaaaacaggaggtgagttagctgaagcaattaaagtagctttagccaatacagatggtcctaccttaatcgaatgtttcattggacgtgaagattgtactgaagagttagttaaatggggaaagcgtgttgccgctgcaaattctcgtaaacctgtaaacaaactcttgtagttaggatccagcaagtttcatcccgaccccctcagggtcgggatttttttattgtgagctctgacataagtaaaggcatcccctgcgtgatataattaccttcagtttaaggaggtatacacatatgattaaagcctacgctgccctggaagccaacggaaaactccaaccctttgaatacgaccccggtgccctgggtgctaatgaggtggagattgaggtgcagtattgtggggtgtgccacagtgatttgtccatgattaataacgaatggggcatttccaattaccccctagtgccgggtcatgaggtggtgggtactgtggccgccatgggcgaaggggtgaaccatgttgaggtgggggatttagtggggctgggttggcattcgggctactgcatgacctgccatagttgtttatctggctaccacaacctttgtgccacggcggaatcgaccattgtgggccactacggtggctttggcgatcgggttcgggccaagggagtcagcgtggtgaaattacctaaaggcattgacctagccagtgccgggccccttttctgtggaggaattaccgttttcagtcctatggtggaactgagtttaaagcccactgcaaaagtggcagtgatcggcattgggggcttgggccatttagcggtgcaatttctccgggcctggggctgtgaagtgactgcctttacctccagtgccaggaagcaaacggaagtgttggaattgggcgctcaccacatactagattccaccaatccagaggcgatcgccagtgcggaaggcaaatttgactatattatctccactgtgaacctgaagcttgactggaacttatacatcagcaccctggcgccccagggacatttccactttgttggggtggtgttggagcctttggatctaaatctttttccccttttgatgggacaacgctccgtttctgcctccccagtgggtagtcccgccaccattgccaccatgttggactttgctgtgcgccatgacattaaacccgtggtggaacaatttagctttgatcagatcaacgaggcgatcgcccatctagaaagcggcaaagcccattatcgggtagtgctcagccatagtaaaaattagctctgcaaaggttgcttctagatctgtggaacgcccggttgccaccgggcgttttttattcctgcaggcccaatatcttgtcatacatacttatttgcctcactattagccctatatgtctctattgtatttttctttttctcctattcctagatcttgtaatgaatcattactctctgaaatatagctactaattttatggttgtttgtaaaatatattaacaaatgaacaataaatcatattttgtgttaatctaattattagacaactactgaatttatattcagatattcacagataggagaattttgattatgaattcttataccgtgggtacttatttagccgaacgcttagtgcaaattggtttaaaacatcattttgccgtggctggggactataatttagtgttattggataacttattattaaataaaaacatggaacaagtgtattgttgtaatgaattaaattgtggtttttctgctgaaggttatgctagagctaaaggtgcagctgctgctgttgttacttattctgtgggtgctttatctgcttttgatgctattggtggtgcttatgccgaaaatttacccgtgattttaatttctggtgcccctaataataatgatcatgccgctggacatgttttacatcatgccttaggtaaaaccgattatcattatcaattagaaatggccaaaaatattactgctgctgccgaagctatttatactcctgaagaagcccctgccaaaattgatcatgtgattaaaaccgccttacgcgaaaaaaaacccgtgtatttagaaattgcctgtaatattgcttctatgccttgtgctgctcctgggcctgcttctgctttatttaatgatgaagcctctgatgaagctagtttaaatgctgccgtggaagaaaccttaaaatttattgccaatcgcgataaagttgccgtgttagttggttctaaattaagagctgctggtgctgaagaagctgctgttaaatttgctgatgctttaggtggtgcagttgctactatggctgctgccaaatctttttttcccgaagaaaatccccattatattggaactagttggggagaagtttcttatcctggtgtggaaaaaactatgaaagaagccgacgctgttattgctttagcccctgtgtttaatgattattctaccactggttggactgatattcccgatcccaaaaaattagttttagccgaacctcgttctgttgttgttaatggtgttcgctttccctctgtgcatttaaaagattatttaacccgcttagcccaaaaagtttctaaaaaaactggtgccttagatttttttaaatctttaaatgcgggtgaattaaaaaaagctgctcctgctgatccttctgctcctttagttaatgctgaaattgcccgtcaagttgaagccttattaacccctaatactaccgttattgccgaaactggtgattcttggtttaatgcccaacgcatgaaattacctaatggtgcccgtgttgaatatgaaatgcaatggggtcatattggttggtctgtacctgctgcttttggttatgctgttggtgctcctgaacgtcgtaatattttaatggtgggtgatggttcttttcaattaactgcccaagaagttgcccaaatggttcgcttaaaattacccgttattatttttttaataaataattatggttataccattgaagtgatgattcatgatgggccatataataatattaaaaattgggattatgcgggtttaatggaagtgtttaatggtaatggtggttatgattctggtgctggtaaaggtttaaaagccaaaactggtggtgaattagctgaagctattaaagttgccttagccaatactgatgggccaaccttaattgaatgttttattggtcgcgaagattgtaccgaagaattagttaaatggggtaaacgtgttgctgctgctaattctcgcaaacccgtgaataaattattgtaatttttggggatcaattcgagctcagcaagtttcatcccgaccccctcagggtcgggatttttttattgtactcgagcgctcgttccgcaaagcggtacggagttagttaggggctaatgggcattctcccgtacaggaaagagttagaagttattaattatcaacaattctcctttgcctagtgcatcgttacctttttaattaaaacataaggaaaactaataatcgtaataatttaacctcaaagtgtaaagaaatgtgaaattctgacttttataacgttaaagagggaaaaattagcagtttaaaatacctagagaatagtctggggtaagcatagagaattagattagttaagttaatcaaattcagaaaaaataataatcgtaaatagttaatctgggtgtatagaaaatgatccccttcatgataagatttaaactcgaaaagcaaaagccaaaaaactaacttccattaaaagaagttgttacatataacgctataaagaaaatttatatatttggaggataccaaccatgtctcatattcaacgtgaaactagttgttctcgccctcgtttaaattctaatatggatgccgatttatatggttataaatgggctcgtgataatgttggtcaatctggtgctactatttatcgtttatatggtaaacctgatgctcctgaattattcttgaaacatggtaaaggttctgttgctaatgatgttactgatgaaatggttcgtttaaactggttgactgaatttatgcctttacctactattaaacattttattcgtactcccgatgatgcttggttattaactactgctattcctggtaaaactgcttttcaagttttagaagaatatcctgattctggtgaaaatattgttgatgctttagctgtttttttacgtcgtttacattctattcccgtttgtaattgtccttttaattctgatcgtgtttttcgtttagctcaagctcaatctcgtatgaataatggtttagttgatgcttctgattttgatgatgaacgtaatggttggcctgttgaacaagtttggaaagaaatgcacaaattgttacctttttctcctgattctgttgttactcatggtgatttttctttagataatttgatctttgatgaaggtaaattgattggttgtattgatgttggtcgtgttggtattgctgatcgttatcaagatttagctattttatggaattgtttaggtgaattttctccttctttacagaaacgtttatttcagaaatatggtattgataatcctgatatgaacaagttacaatttcatttaatgttggacgagttcttttaagaattaattcatgaccaaaatcccttaacgtgagttttcgttccactgagcgtcagaccccgtagaaaagatcaaaggatcttcttgagatcctttttttctgcgcgtaatctgctgctatttaaattacgtacacgtgttattactttgttaacgacaattgtcttaattaactgggcctcatgggccttccgctcactgcccgctttccagtcgggaaacctgtcgtgccagctctgcagatgacggtgaaaacctctgacacatgcagctcccggagacggtcacagcttgtctgtaagcggatgccgggagcagacaagcccgtcagggcgcgtcagcgggtgttggcgggtgtcggggcgcagccatgacccagtcacgtagcgatagcggagtgtatactggcttaactatgcggcatcagagcagattgtactgagagtgcaccatatgcggtgtgaaataccgcacagatgcgtaaggagaaaataccgcatcaggcgctcttccgcttcctcgctcactgactcgctgcgctcggtcgttcggctgcggcgagcggtatcagctcactcaaaggcggtaatacggttatccacagaatcaggggataacgcaggaaagaacatgtgagcaaaaggccagcaaaaggccaggaaccgtaaaaaggccgcgttgctggcgtttttccataggctccgcccccctgacgagcatcacaaaaatcgacgctcaagtcagaggtggcgaaacccgacaggactataaagataccaggcgtttccccctggaagctccctcgtgcgctctcctgttccgaccctgccgcttaccggatacctgtccgcctttctcccttcgggaagcgtggcgctttctcatagctcacgctgtaggtatctcagttcggtgtaggtcgttcgctccaagctgggctgtgtgcacgaaccccccgttcagcccgaccgctgcgccttatccggtaactatcgtcttgagtccaacccggtaagacacgacttatcgccactggcagcagccactggtaacaggattagcagagcgaggtatgtaggcggtgctacagagttcttgaagtggtggcctaactacggctacactagaaggacagtatttggtatctgcgctctgctgaagccagttaccttcggaaaaagagttggtagctcttgatccggcaaacaaaccaccgctggtagcggtggtttttttgtttgcaagcagcagattacgcgcagaaaaaaaggatctcaagaagatcctttgatcttttctactgcagaagcttgttagacaccctgtcatgtattttatattatttatttcaccatacggattaagtgaaacctaatgaaaatagtactttcggagctttaactttaatgaaggtatgtttttttatagacatcgatgtctggtttaacaataggaaaaagtagctaaaactcccatgaattaaagaaataacaaggtgtctaacaacctgttattaagaatgttagaaaagacttaacatttgtgttgagtttttatagacattggtgtctagacatacggtagataaggtttgctcaaaaataaaataaaaaaagattggactaaaaaacatttaatttagtacaatttaattagttattttttcgtctcaaattttgctttgttgagcagaaatttagataaaaaaatccccgtgatcagattacaatgtcgttcattgtacgatgtgtcgaaaaatctttacgacactctaaactgaccacacgggggaaaaagaaaactgaactaataacatcatgatactcggaaaacctagcaattctcaacccctaaacaaaagaaacttccaaaaccctgaccatataaaggagtggcaacaatcagcaatcagtcaagatttgatagcagaaaatcttgtatcggttgctaatggttttgatgtactatttatcggcaataaataccgaactaacacgggtgttctgtcacggcacatattaaactcctattctcatttagaagatggtggttcgtatggtagaacatttgacccatttaccaataaagaaatgcagtgggttcaatttaaaccgaatagaccaagaaaaggttctactggtaaggtaatcaaatatgaatcgccaaaaggtgaacctacaagagttctaatgccgtttgtgcctatgaaaatatggcaacggattagcgataagttcggagtaccgattaatccgaaaaaagatactcacttttgggaatgggtaaagaataatccatcgataccgattgccattacagaaggaaataaaaaagctaattgcctattatcctatggctatcctgctattgcctttgtaggcatttggaacggattagagaaaataaatgatttctcgaaggaaaagcagttaaaagaggatttgaaatggttgttatccaacggcaaccgaaatattaatatcatctttgaccaagaccagaaacaaaaaactgtaattaatgtaaacaaagctattttcgctttatcttctctaataagtagaaatggtcataaagttaatattgtgcaatggttgccgtcaaaaggtaaaggaatagatgattatttggtagctttaccttttgagaaaagagaaaatcatttagacaacttaattaaaattgcaccatcatttaatttttggtcaactaaatacttattcaagtgtcgtaaaccagatttaaccgtaaattgccgttatttgagcgatgcagtaaaagaattacctcaagaggatatagcattaatagcacctcacggcacgggtaaaacttcattagtagctactcacgttaagaatcggagttatcacggaaggaaaactatttcattggtgcatcttgaaagtttagccaaagctaatggcaacgcacttggattatattaccgaaccgaaaataatattgaaaagcaatatcttggatttagcttatgtgtagatagttgccgtgataagattaacggcattacaactgatattatttcaggtcaagattattgccttttcattgatgaaattgaccaagtaattccacacatccttaacagtgaaactgaagtaagtaagtatagatgcaccatcattgacactttttctgaactggtgagaaatgctgaacaggtcattattgctgatgctgatttatccgatgtgacgattgacctaatagaaaacatcagaggtaaaaaactatatgtaatcaagaatgaatatcagtatcagggaatgacttttaacgccgttggttcaccattagaaatgatggcaatgatgggaaaatcggtgtcagaaggcaagaaattatttattaacaccacatcccaaaaggcaaaaagtaagtacggcacaatcgctcttgagtcttatatttttggtctaaataaagaagcaaagatattaagaatagactctgaaaccactaaaaaccctgaacatccagcctataaaatcattgaccaagacttaaataatatcctcaaagattatgattatgtcattgcctcaccttgccttcaaacaggtgtcagtattaccttaaaagggcattttgaccagcaatttaacttttccagtggaaacattacacctcattgctttttacagcaaatgtggcggttgagggatgcagaaattgaaagattctattatgtgccgaactcatctaacctcaatctcattgggaataagtcaagttcaccatcagaccttctaaagagcaataacaagatggcaacggcaacggttaaccttttgggtagaatcgactccgaatattccctagagtatgaatcgcacggcatttggcttgagacgtgggcaaaattatcagcacggcataacagttcaatgcgttgttactctgaaattcttacctatctaattacgtctcaagggcataaattaaatatcaacattccctcacctcttgcagatattaagaagctaaatgatgaggtaagtagtaacagggaaaaggtaaaaaatgagagatactctcagaggttaaactcaccagatattaacgatgcagaagctaccatactcgaatctaaagagcaaaaaatcggattgactctcaatgagagatgcaccctagaaaagcataaagttaagaagcggtatgggaatgtaaagatggatattctcacctttgatgatgatggactataccccaaactcagactattttattacctcaccatcggtaaacctcatctcaaggctaatgacagaaaagctattgccaaaatgggcaatgacaataaaggcaagattctatcaaaagacttagttaataaaacttactccgctcgtgtgaaggtcttagagattcttaaactaactgactttatcgacaatcttagagatgaactcttaataactcccaataatccagctatcaccgattttaataatcttctgctaagagctaagaaggatttaagagtattaggagtcaacatcggaaaatatccaatggccaacattaatgccgtacttactctcattggtcacaaactttctgtaatgagagatgagttcggaaaagagaaaaggataaaagtagatggtaaatcataccgatgttatcaacttgaaacattaccagattttaccaatgatactcttgactactggttagaaaatgatagccaaaaagaagtaacagcaacagaaaattactccgaaaattttaacccttcaaatagctacaatccagacagtaagacactttcagagggtgcaaatttcctatatataaataaagaagaattgcatccaaataaattgcacctagaaataaaagaaggtgctgaactttttttattcggggtaaaggtgattgtgaaaggaatcttggacggggcagtaactatattctctatgggtcaagaatacgatttatccctcaatgaactagaggggatgttaacatcatgaactttacaagaatctttttaaagggcgatcgcaccatgttaaatgatggtacatttgttcagatatttgatatttaccatgaccacgcattgggagtgacccttgaccttaagacagaaaaaattatttccgatgatgttagggtaattactgtcaaagacttattgttcgatggcacttataaaggggtaaaatcttttatgcccgataatgcccgataatgcccgattgatgctacaaaatcccataatcataagcgataatcccctaatagcttgtaattcttgaaccgtagcgattttagagtattccaaaaagaagaaataaacaccgcaaaatgtcgtatttcacatatataaaccaaggttttttgccctaaaatctttatgtttgtagtgtgatgttgggtcaaaatggtcagaaaagttgcaaggtttttatggatgcttacgcgcgcgaggggtaagcatccccaaatagttactttatcctagtccatgcccatttattgccgtcccgttcggctttaaaaaagtgccaaaactcacaaggtgcaataaaaagttctgtacctttcgcaaccctagataatctttcaacagttactttttttcctattatctcggtacaaagtttggctagtttctcttttccctctttttcaatcaagccttcttgtatgcccaactcattgattaatctctctatttttaccattatttcccgttcaggtagtttatcccctaaatcttcatcggggggcaatgtagggcattctgaaggggctttttcttctgtctggacattatctaatattgaagtaaccaaactatcttcagttttttctattcctattaattcatattcggttactgtatccgtatcaatatccgaataactatctttatccgtattagctattcggttaagtttatccgttaactcagaaacaagactatatagcggttttagcttttcttctatcctgttatctaatacggataagtttatacggttatcattatccgtattagtatcattgggcttttttggtagttctaccccctcataaaccgcttttattcccaattccaacagactgataacagtatcctttataatgggttttttgctgatatggtgaacttttgccccttccatcattgcgatactttctatctcactcatcaacttatcgcttaagtgaatctcgtatctgtttaatcccttactggttttattcatatccgtttactttattcggttaacaattctattttatacgaataaaatattatacggttaactttatacgtttaactattttatctatacggataacagtaataagttattcgtattagttatacgtttacttttatccaaataaaattagtgcatttaaactaaaagaatgattttatcggagttgatagcattggattaacctaaagatgtttataagctatatctgataagtatttaaggttattttgttattctgtttattgacattatcagaataaaagaatagaatataattgttgagagataagaggtttaagtgattatggttaagaagttagttggttatgtcagggtcagtagtgaatcgcaagaggataacactagcttacagaatcagatagagagaattgaagcatattgtatggcttttggttatgagttggtaaaaatattcaaagaggttgccactggtacaaaagcagatattgaaacccgtcctatttttaatgaagctatagaatacttgaaacaggataatgctaatggaattattgccttgaagctagaccgaatcgcacggaatgctttagatgtattgcgtttggttcgtgaaaccttagaaccacaaaataaaatgttagtgttactagatattcaggtagatacttcgacaccttcaggaaaaatgattttaactgtaatgagtgccgttgctgaactcgaaagagacatgatctatgatcgcactcaggggggtagaaagactaaagcccaaaagggcgggtatgcctacgggaaacctaaatttggctataagactgaagaaaaggaactaaaagaagattcagcacaacaggaaactattaaactaattaagagacaccgtaggtcagggaaaagctaccagaaaatagctgattatctcaatgcccaaagtattcccactaaacaaggtaagaaatggagttctagcgtcgtctatcgaatctgtcaggaaaaagctggttaagtctgtttatagatatttagaatttattgaataaaaatagtatgaacaataaatatttatggactaaccacgctcggaaacgtttaactgaacgatgggaaataaaagaatcatgggttattgataccatcgaaaatcctgaacgttcagaatttattgttgatgagtcaggggaaaaatatcattactataaaagaatagctaagtttaagaatagagtgttagaagtgataacttctgccaactcaacacccacaagaataataaccttttactttaaccgtaacatgaggaaaaatttatgattgttacttacgataatgaagttgacgcaatttattttaagttaacggaaaataaaattgatagcaccgaacctcaaacagacaggattatcattgattacgatgaaagtaataatattgttggcattgaggtattagattttaattatcttgtcaagaaaggtttaaccgttgctgatttacctttttctgaagatgaaagattaacagcttctcaatattttaattttcctgttgctatctaatccagaaggggcaataatccccttctttcatcgagttagacttaatatcacaaaagtcattttcattttaccgtttcttttccacagcgtccgtacgcccctcgttaaatctcaaaaccgacaatttatgatgtttataaaaagttactcactttaataagtatttatactcattaaagggttattctttttttgtagcctgataggttgggaaggaatatttcagattatcagatttgttgaatatttttcgtcagatacgcaaaccttacaaacataattaacaactgaaactattgatatgtctaggttttagctctatcacaggttggatctg

SEQ ID NO: 112 - DNA, 281 bp, Artificial Sequence
  Generalized sequence of nirA promoter
  misc_feature (1)..(116): n is a, c, g, or t
  misc_feature (132)..(138): n is a, c, g, or t
  misc_feature (154)..(168): n is a, c, g, or t
  misc_feature (183)..(204): n is a, c, g, or t
  misc_feature (211)..(265): n is a, c, g, or t
  misc_feature (277)..(278): n is a, c, g, or t
nnnnnnnnnnnnnnnnnnnnnnnnnnnnnnnnnnnnnnnnnnnnnnnnnnnnnnnnnnnnnnnnnnnnnnnnnnnnnnnnnnnnnnnnnnnnnnnnnnnnnnnnnnnnnnnnnnnnatgcaaaaaacgaatnnnnnnnatgtgtaaaaagaaannnnnnnnnnnnnnngtagtcaaagttacnnnnnnnnnnnnnnnnnnnnnntaatgtnnnnnnnnnnnnnnnnnnnnnnnnnnnnnnnnnnnnnnnnnnnnnnnnnnnnnnnccgaggacaaannatg

SEQ ID NO: 113 - DNA, 282 bp, Artificial Sequence
  generalized sequence for nirA promoter
  misc_feature (1)..(116): n is a, c, g, or t
  misc_feature (132)..(138): n is a, c, g, or t
  misc_feature (154)..(168): n is a, c, g, or t
  misc_feature (183)..(204): n is a, c, g, or t
  misc_feature (211)..(265): n is a, c, g, or t
  misc_feature (278)..(279): n is a, c, g, or t
nnnnnnnnnnnnnnnnnnnnnnnnnnnnnnnnnnnnnnnnnnnnnnnnnnnnnnnnnnnnnnnnnnnnnnnnnnnnnnnnnnnnnnnnnnnnnnnnnnnnnnnnnnnnnnnnnnnnatgcaaaaaacgaatnnnnnnnatgtgtaaaaagaaannnnnnnnnnnnnnngtagtcaaagttacnnnnnnnnnnnnnnnnnnnnnntaatgtnnnnnnnnnnnnnnnnnnnnnnnnnnnnnnnnnnnnnnnnnnnnnnnnnnnnnnnggaggatcagccnnatg

SEQ ID NO: 114 - DNA, 281 bp, Artificial Sequence
  Variation on a generalized nirA promoter with changes to the operator region and the TATA box
  misc_feature (1)..(116): n is a, c, g, or t
  misc_feature (132)..(138): n is a, c, g, or t
  misc_feature (154)..(168): n is a, c, g, or t
  misc_feature (183)..(204): n is a, c, g, or t
  misc_feature (211)..(265): n is a, c, g, or t
  misc_feature (277)..(278): n is a, c, g, or t
nnnnnnnnnnnnnnnnnnnnnnnnnnnnnnnnnnnnnnnnnnnnnnnnnnnnnnnnnnnnnnnnnnnnnnnnnnnnnnnnnnnnnnnnnnnnnnnnnnnnnnnnnnnnnnnnnnnnatgcaaaaaacgcatnnnnnnnatgcgtaaaaagcatnnnnnnnnnnnnnnngtaatcaaagttacnnnnnnnnnnnnnnnnnnnnnntaatatnnnnnnnnnnnnnnnnnnnnnnnnnnnnnnnnnnnnnnnnnnnnnnnnnnnnnnnccgaggacaaannatg

SEQ ID NO: 115 - DNA, 280 bp, Artificial Sequence
  Variation of generalized nirA promoter.
  misc_feature (1)..(116): n is a, c, g, or t
  misc_feature (132)..(138): n is a, c, g, or t
  misc_feature (154)..(168): n is a, c, g, or t
  misc_feature (183)..(204): n is a, c, g, or t
  misc_feature (211)..(265): n is a, c, g, or t
  misc_feature (276)..(277): n is a, c, g, or t
nnnnnnnnnnnnnnnnnnnnnnnnnnnnnnnnnnnnnnnnnnnnnnnnnnnnnnnnnnnnnnnnnnnnnnnnnnnnnnnnnnnnnnnnnnnnnnnnnnnnnnnnnnnnnnnnnnnnatgcaaaaaacgcatnnnnnnnatgcgtaaaaagcatnnnnnnnnnnnnnnngtaatcaaagttacnnnnnnnnnnnnnnnnnnnnnntaatatnnnnnnnnnnnnnnnnnnnnnnnnnnnnnnnnnnnnnnnnnnnnnnnnnnnnnnnggagtcagccnnatg

SEQ ID NO: 116 - DNA, 87 bp, Artificial Sequence
  Generalized sequence of promoter corT.
  misc_feature (4)..(10): n is a, c, g, or t
  misc_feature (57)..(71): n is a, c, g, or t
catnnnnnnngtttactcaaaaccttgacattgacactaatgttaaggtttaggctnnnnnnnnnnnnnnncaagttaaaaagcatg

SEQ ID NO: 117 - DNA, 87 bp, Artificial Sequence
  A generalized corT promoter sequence with changes to the ribosomal binding site.
  misc_feature (4)..(10): n is a, c, g, or t
  misc_feature (57)..(71): n is a, c, g, or t
catnnnnnnngtttactcaaaaccttgacattgacactaatgttaaggtttaggctnnnnnnnnnnnnnnngaggataaaaagcatg

SEQ ID NO: 118 - DNA, 87 bp, Artificial Sequence
  Generalized sequence of corT promoter having changes in the TATA box.
  misc_feature (4)..(10): n is a, c, g, or t
  misc_feature (57)..(71): n is a, c, g, or t
catnnnnnnngtttactcaaaaccttgacattgacactaatgttaaggtttagaatnnnnnnnnnnnnnnncaagttaaaaagcatg

SEQ ID NO: 119 - DNA, 87 bp, Artificial Sequence
  A generalized corT promoter sequence with changes to the ribosomal binding site and the TATA box.
  misc_feature (4)..(10): n is a, c, g, or t
  misc_feature (57)..(71): n is a, c, g, or t
catnnnnnnngtttactcaaaaccttgacattgacactaatgttaaggtttagaatnnnnnnnnnnnnnnngaggataaaaagcatg

SEQ ID NO: 120 - DNA, 96 bp, Artificial Sequence
  A generalized smtA promoter sequence.
  misc_feature (1)..(8): n is a, c, g, or t
  misc_feature (35)..(38): n is a, c, g, or t
  misc_feature (69)..(80): n is a, c, g, or t
  misc_feature (87)..(93): n is a, c, g, or t
nnnnnnnnaatacctgaataattgttcatgtgttnnnntaaaaatgtgaacaatcgttcaactatttannnnnnnnnnnnggaggtnnnnnnnatg

SEQ ID NO: 121 - DNA, 96 bp, Artificial Sequence
  A generalized sequence for smtA promoter having changes in the ribosomal binding site.
  misc_feature (1)..(8): n is a, c, g, or t
  misc_feature (35)..(38): n is a, c, g, or t
  misc_feature (69)..(78): n is a, c, g, or t
  misc_feature (90)..(93): n is a, c, g, or t
nnnnnnnnaatacctgaataattgttcatgtgttnnnntaaaaatgtgaacaatcgttcaactatttannnnnnnnnnaaggaggtgatnnnnatg

SEQ ID NO: 122 - DNA, 96 bp, Artificial Sequence
  A generalized sequence of smtA promoter having changes to the ribosomal binding site.
  misc_feature (1)..(8): n is a, c, g, or t
  misc_feature (35)..(38): n is a, c, g, or t
  misc_feature (69)..(78): n is a, c, g, or t
  misc_feature (89)..(93): n is a, c, g, or t
nnnnnnnnaatacctgaataattgttcatgtgttnnnntaaaaatgtgaacaatcgttcaactatttannnnnnnnnnaaggaggtatnnnnnatg

SEQ ID NO: 123 - DNA, 129 bp, Cyanobacterium sp. ABICyano1
gagctctagaaaaactattgacaaacccataaaaaatgagataagattatagattgtcactggtattttatactagaggcaaattatatttatatatacaaaaatgctgtataaaaaacatctcatatg

SEQ ID NO: 124 - DNA, 128 bp, Cyanobacterium sp. ABICyano1
gagctctagaaaaactattgacaaacccataaaaaatgtgatataattatagattgtcactggtattttatactagaggcaaattatatttatatatacaaaaatgctgtaggaggatcagccatatg

SEQ ID NO: 125 - protein, 575 aa, Cyanobacterium sp. ABICyano1
MTHNLPRQRWKFYPSQPHIVTDIVKHFGVSPIMAQVIANRGIDDIDSAQAYITPETVNLPSPLAEFPDLPHSIQLLKDAIASGAKIAICGDYDADGMTSTALLIRALKHLEAKVDYAIPSRMKDGYGINERIVEEFKQEGVSLILTVDNGISAYNPIKRAKELGLKVIITDHHDLPEKLPPADAILNPKLLPETSPYYGLAGVGVAYVLGVCLAQSLGKLDGLTKSLLELYTIGTIADLAPLTGVNRRWLKRGLKLLPKSDILGIQALSKCAGLTEEKKQLHSDDIGFKLGPRVNAIGRLDDPQIVIELFTTDDEQIAITKALQCEQTNHTRQELCKQIEKEAIEIIETKPIKWQEDRVLLIINNHWHHGVIGIVASRLVERYGVPVFIGTYEDEEPSIIRGSARGIEEYNIFSALQYCDDLLKKYGGHKAAGGFSFEAKNLDLIHQRLKEFSYQCLLPEYLKPLIKIDTQITFEQITFKLLQEIESLYPWGIENKAPIFWTPQVEIKSERITKTGEHLQLFISDGTRELKAIAWRWAVYSPLPKIVDIAYKLKENEWQGEKSIQLELVGIRQNL

SEQ ID NO: 126 - protein, 800 aa, Cyanobacterium sp. ABICyano1
MYKSSILWCFNPDENIPDDFFIQVNNIVNNRQQNQLKDIKYLALLLWKRNIRTKQDLEHFFNPQYIHDNNSIFAQEIDVAVARLIKGSEKQEKIIIWGDYSCDSIITTTILFTGLKNIFRAEDNQLSYYFSPRNYPKFGLNSSEIKNLADKGYKLIICAGMGSNNYQEINYANSLGLDIIIVDNTFLSVDKPPVCAWLNPHLLPKHHPDYSLSGGAFGVVAPSVIAFFLIKKLFSRLSENINLNNLLLLISLDLLQGKYDLWGNNRYLLLKGINLLKKEHNFGTQLLIEVCKRNGYHPLNTYQGISEKFNTLIGMYSNPENIINIITNEDKNKNSAYINKIEKAYFSYQDLNYTYLQYIHKQVNLLDLSNHKYLIFKGNKWNVNIINLVAKNTYNLYKLPVIILSNYDQDNIFYGFIYGFFSEYWEQVFSQKDWIIDYKLSSDGFSFFILEENITILTELISQKINNNIYHNSQTINIDLVLTIFDLNNILFQQIGIIEPYSINNPPVNIMLKNCNVNNLFEKKYDKFKGKSQNYTRDLTLEFWIEDDSCDIPFKAIWWGAKKDNLEKDKTYDIIGTIEYQYHFKSTEKIYYLRVIDLKPSNSSNRFYVKNNYISILDYRQTKKTDELVNINGKIIDKCPLKWSEINRSYQDAIAEDAATSNAQSTASPKPYKSSLILAYNHPSEKELEELWHQFLTIIKLSLQGKKSVNKESLLETLCISDLSLNKICHILPLIGVSFRIQPEEIIFSKIRETFPPENYLEAKQNFQDIISQEYLQKEYFYKVKVEKIKEYLDFQKHIY

SEQ ID NO: 127 - DNA, 1728 bp, Cyanobacterium sp. ABICyano1
atgacacataatttaccccgtcaacgttggaaattttatccttctcaacctcacatcgttacagatattgttaagcactttggggtttctcccatcatggcacaggttatcgctaatcgtggcattgacgatatagactccgcccaagcctatatcacccccgaaactgttaacttaccttctcccctcgcagagtttcccgatttaccccatagtattcaattattaaaagatgcgatcgcatctggggcaaaaatagctatctgtggagactatgatgcagacgggatgaccagtacagccttactaattagagccttaaaacaccttgaagcaaaagtagattatgctattcccagtcgtatgaaagacggttatggtattaatgaacgtattgtcgaagaatttaagcaagaaggagtaagtttaattctgacggtagataatggtatttctgcctataatcccatcaaaagggcaaaagaattaggtttaaaggttattataaccgaccatcatgacctcccagaaaaattaccccctgccgatgctattctcaatcccaaacttctcccggaaacttctccctattatggattagcaggagtcggagtagcttatgtcttaggagtttgtttggctcaatctttaggaaaattagacggtttaaccaaatctcttttagaattatacaccataggtacgatcgcagatcttgcccctttaactggggtgaatcgccgttggttaaaaagaggtttaaaactacttcctaaatcagatattctaggaattcaagccctaagtaaatgtgcaggattaacggaagaaaaaaaacagttgcattctgatgatataggttttaaattagggccaagagtcaatgctatcggtagattagatgacccacaaattgtcattgaattattcaccaccgatgacgaacaaatcgccattactaaagcattgcaatgtgagcaaactaatcatactcgtcaagaattatgcaaacaaatcgaaaaagaagccatagaaattatcgaaacaaaaccaattaaatggcaagaagatcgagtattattaattattaataatcattggcatcatggtgtaattggcatcgttgcctctcgtttagtagaacgttatggagtgccagtttttatcggtacttatgaagatgaagaaccaagtataataagaggttcagcgagaggaattgaagaatataatatattttctgctttacaatattgtgatgatttattaaagaaatatgggggtcataaagccgcaggaggttttagttttgaagcgaaaaacttagatttaattcatcaacgtttaaaagaattttcttatcaatgcttactacctgaatatttaaaacctttaattaaaatagatactcaaataacctttgaacaaataaccttcaaattattacaagaaattgagagtttatacccttggggtattgaaaataaagccccgattttttggactccccaagtagaaatcaagtctgaaagaattactaaaacaggagagcatttacaactatttatttctgatggtacaagagaactaaaagcgatcgcatggcgttgggcggtatattcacctctacctaaaatagtggatattgcctataaactaaaagaaaatgaatggcaaggagaaaaatctattcaactagaattagttggcatccgacaaaatctttga

SEQ ID NO: 128 - DNA, 2403 bp, Cyanobacterium sp. ABICyano1
atgtataaaagtagtattttatggtgttttaatcctgatgaaaatataccagacgacttttttattcaagtaaataatattgttaataatcgacaacaaaatcaactaaaagatattaaatatttagctttattattatggaaaagaaatattcgtactaaacaagatttagaacatttttttaaccctcaatatattcacgataataactctatctttgcgcaggaaattgatgttgctgttgctagattaattaaaggaagtgagaaacaagaaaaaattattatttggggtgattattcttgcgatagtattattacaactaccatcctatttactggattaaagaatatttttagagcagaagataatcaattatcctattatttttctcctagaaattatcctaaatttggattaaattcttcagaaattaaaaacttagcagataaaggttataaattaattatttgtgctggaatgggaagtaataattatcaagaaattaattatgctaatagtctaggcttagatattattatcgttgacaatacttttttatctgtagataaacctcctgtttgtgcatggcttaatcctcatcttttaccaaaacatcatcctgattattctttatctggaggtgcattcggcgtagtcgcaccttcggtgatcgcattttttcttattaaaaagttattttctcgtttgtctgaaaatattaacttaaataatttattattgttaatctctttagacttgctacaaggaaaatatgatttatggggaaataatcgatacttgcttctaaaaggaataaatttgttaaaaaaagagcataattttgggacacaacttttaatagaggtatgcaaaagaaatggttatcatcctttaaatacttatcagggaatcagtgagaaatttaatactttaataggaatgtatagtaatcctgaaaatataattaatattattactaatgaagataaaaataaaaattcagcctatataaataaaatcgagaaagcatactttagttatcaagacttaaattatacatatttacagtatatacataagcaggttaatttactggatctaagtaatcacaagtatttaatttttaaaggtaacaaatggaatgtaaatattatcaatctagttgcaaaaaatacttataatttatataaattacctgtcatcattttatctaattacgatcaagataatattttttatggttttatttatggctttttttctgagtattgggaacaagtatttagtcaaaaagattggattattgactataaattatcttcagatggtttcagtttttttatattagaagaaaatattacaattttaaccgaattgattagtcaaaaaattaacaataatatttatcataattcgcaaaccattaatatagacctagttttaactatatttgatttgaataatattctctttcaacaaataggaattattgagccttattcgataaataatcctcctgtaaatataatgcttaaaaactgtaatgttaataacttatttgagaaaaaatatgataaatttaaaggaaaaagtcagaattacactagagatttaactttagagttttggatagaagatgatagttgtgatattccgttcaaagctatttggtggggagcaaaaaaagataatcttgaaaaagataaaacttatgatattatcggcactattgagtatcaatatcacttcaaaagtactgagaaaatctattatttaagagtgattgatttaaaaccaagtaattctagtaatagattttatgtaaaaaataattacatttctattcttgattatagacaaacaaaaaaaacagatgaattagtaaatattaatggtaaaattatagataaatgccctcttaaatggtcagaaattaatcgtagttatcaggatgcgatcgccgaagatgcagctacgtcgaacgcacaatctacagcttcacctaagccttacaaaagtagtttaatcctagcttataatcatccatcagaaaaagagttagaagaattatggcatcaatttctaaccattattaaactatccctacaagggaaaaaaagcgttaacaaagagtctttattagagacattatgtatcagtgatttatccttaaataaaatttgtcatattttgcctttaattggtgttagttttcggattcagccggaagaaattatattcagtaaaatacgggagacttttcctccagaaaattatttagaagcaaagcagaattttcaagatataattagtcaagaatatttacaaaaagagtatttttataaagttaaagtagaaaaaataaaggaatatttagattttcagaaacatatttattaa

What is claimed is:

1. A non-naturally occurring ethanologenic Cyanobacterium sp. organism derived from Cyanobacterium sp. ABICyano1 wherein said organism comprises a genetically enhanced plasmid derived from a plasmid that is endogenous to Cyanobacterium sp. ABICyano1, and wherein said organism produces ethanol from about 0.002% (vol/vol) per day up to about 0.07% (vol/vol) per day.

2. The non-naturally occurring ethanologenic Cyanobacterium sp. organism of claim 1 wherein said organism is capable of producing ethanol at a rate of 0.07%(vol/vol) per day.

3. The non-naturally occurring ethanologenic Cyanobacterium sp. organism of claim 1 wherein said organism is capable of producing ethanol at a rate of 0.047% (vol/vol) per twelve hours.

4. The non-naturally occurring ethanologenic Cyanobacterium sp. organism of claim 1 wherein said organism is capable of producing ethanol at a rate of about 0.0201% (vol/vol) per day at about 114 days of growth.

5. The non-naturally occurring ethanologenic Cyanobacterium sp. organism of claim 1 wherein said organism produces ethanol at about 135 days of growth.

6. The non-naturally occurring ethanologenic Cyanobacterium sp. organism of claim 1 comprising Cyanobacterium sp. ABICyano1 deposited in the American Type Culture Collection (ATCC) under ATCC accession number PTA-13311, and further comprising an ethanologenic pathway comprising at leas one exogenous nucleic acid encoding an ethanologenic pathway enzyme expressed in a sufficient amount for the organism to produce ethanol, said ethanologenic pathway comprising a pyruvate decarboxylase, and an alcohol dehydrogenase.

7. The non-naturally occurring ethanologenic Cyanobacterium sp. organism of claim 6 wherein said genetically enhanced plasmid is derived from a 6.8 kb plasmid endogenous to Cyanobacterium sp. ABICyano1 consisting of SEQ ID NO: 1.

8. The non-naturally occurring ethanologenic Cyanobacterium sp. organism of claim 6 wherein said genetically enhanced plasmid comprises at least 50% of a 6.8 kb plasmid endogenous to Cyanobacterium sp. ABICyano1 consisting of SEQ ID NO: 1.

9. The non-naturally occurring ethanologenic Cyanobacterium sp. organism of claim 7, wherein said organism comprises one, two, or three exogenous nucleic acids each encoding an ethanologenic pathway enzyme.

10. The non-naturally occurring ethanologenic Cyanobacterium sp. organism of claim 9, wherein said organism comprises a heterologous adh gene and a heterologous pdc gene, and
wherein said adh gene is operably linked to a promoter, and
wherein said pdc gene is operably linked to a promoter.

11. The non-naturally occurring ethanologenic Cyanobacterium sp, organism of claim 10, wherein said heterologous adh gene encodes for an alcohol dehydrogenase that has an amino acid sequence identity of at least 60% to the amino acid sequence identity of the enzyme encoded for by nucleotides 117 to 1127 of SEQ ID NO: 48.

12. The non-naturally occurring ethanologenic Cyanobacterium sp. organism of claim 10, wherein said heterologous pdc gene encodes for a pyruvate decarboxylase that has an amino acid sequence identity of at least 60% to the amino acid sequence identity of the enzyme encoded for by nucleotides 379 to 2085 of SEQ ID NO: 43.

13. The non-naturally occurring ethanologenic Cyanobacterium sp. organism of claim 10 comprising a plasmid selected from plasmids comprising polynucleotide sequences that are 90% or more identical to the polynucleotide sequence of any of SEQ ID NOs 43, 61, 62, 66, 72, 73, 74, 82, 83, 84, 85, and 106.

14. The non-naturally occurring ethanologenic Cyanobacterium sp. organism of claim 10, wherein said promoter operably linked to said adh gene is constitutive, and wherein said promoter operably linked to said pdc gene is inducible.

15. The non-naturally occurring ethanologenic Cyanobacterium sp, organism of claim 14, wherein said promoter operably linked to said adh gene is selected from the group consisting of Prbc, Prbc*, PcpcB, PrpsL*4 and PrpsL.

16. The non-naturally occurring ethanologenic Cyanobacterium sp. organism of claim 14, wherein said promoter operably linked to said pdc gene is selected from promoters inducible by the presence or absence of nitrate and/or copper.

17. The non-naturally occurring ethanologenic Cyanobacterium sp. organism of claim 16, wherein said promoter operably linked to said pdc gene is selected from the group consisting of and endogenous PnirA, PnirA, PnirA*1, PnirA*2, PnirA*3, PnirA*4, Porf0221, Porf0223, and Porf0316.

18. The non-naturally occurring ethanologenic Cyanobacterium sp. organism of claim 10, wherein said promoter operably linked to said adh gene is endogenous to Cyanobacterium sp., and wherein said promoter operably linked to said pdc gene is endogenous to Cyanobacterium sp.

19. The non-naturally occurring ethanologenic Cyanobacterium sp. organism of claim 18, wherein said promoter operably linked to said adh gene and said promoter operably linked to said pdc gene are selected from promoters comprising polynucleotide sequences that are 90% or more identical to the polynucleotide sequence of any of SEQ ID NOs 9-41.

20. The non-naturally occurring ethanologenic Cyanobacterium sp. organism of claim 18, wherein said genetically enhanced plasmids are selected from plasmids comprising polynucleotide sequences that are 90% or more identical to the polynucleotide sequence of any of SEQ ID NOs: 62, 66, 82, 83, 84, 85, and 106.

21. A non-naturally occurring ethanologenic Cyanobacterium sp. organism comprising Cyanobacterium sp. ABICyano1 deposited in the American Type Culture Collection (ATCC) under ATCC accession number PTA-13311, and
further comprising an ethanologenic pathway comprising one, two, or three exogenous nucleic acids each encoding an ethanologenic pathway enzyme expressed in a sufficient amount to produce ethanol, and
wherein said ethanologenic pathway has been introduced into the chromosomal DNA of said Cyanobacterium sp. ABICyano1, and
wherein said ethanologenic pathway comprises at least one pyruvate decarboxylase gene operably linked to a promoter and an alcohol dehydrogenase gene operably linked to a promoter.

22. The non-naturally occurring ethanologenic Cyanobacterium organism of claim 21 further comprising a chromosomal knockout of one or more reel homologs from Cyanobacterium sp. ABICyano1 selected from the group consisting of SEQ ID NOs: 127 and 12$.

23. The non-naturally occurring ethanologenic Cyanobacterium sp. organism of claim 21 wherein said ethanologenic pathway has been introduced into said chromosomal DNA of said Cyanobacterium sp. ABICyano1 by transforming said non-naturally occurring ethanologenic Cyanobacterium sp. organism with one or more integrative plasmid.

24. The non-naturally occurring ethanologenic Cyanobacterium sp. organism of claim 23 wherein said integrative plasmid is selected from plasmids comprising polynucleotide sequences that are 90% or more identical to the polynucleotide sequence of any of SEQ ID NOs: 107, 108, 109 and 110.

25. A method for producing ethanol comprising growing a non-naturally occurring ethanologenic Cyanobacterium sp. organism comprising Cyanobacterium sp. ABICyano1 deposited in the American Type Culture Collection (ATCC) under ATCC accession number PTA-13311, and further comprising an ethanologenic pathway comprising at least one exogenous nucleic acid encoding an ethanologenic pathway enzyme expressed in a sufficient amount for the organism to produce ethanol, said ethanologenic pathway comprising a pyruvate decarboxylase, and an alcohol dehydrogenase.

26. The method of claim 25 wherein ethanol is produced from about 0.002% vol/vol ethanol per day up to about 0.07% vol/vol ethanol per day.

27. The method of claim 25 wherein said organism is capable of producing ethanol at a rate of 0.07% (vol/vol) per day.

28. The method of claim 25 wherein said organism is capable of producing ethanol at a rate of 0.047% (vol/vol) per twelve hours.

29. The method of claim 25 wherein ethanol is produced at a rate of about 0.0201%(vol/vol) per day at about 114 days of growth.

30. The method of claim 25, wherein said non-naturally occurring ethanologenic Cyanobacterium sp. organism comprises a plasmid selected from plasmids comprising polynucleotide sequences that are 90% or more identical to the polynucleotide sequence of any of SEQ ID NOs 43, 61, 62, 66, 72, 73, 74, 82, 83, 84, 85, and 106.
